(19) United States
(12) Patent Application Publication
(10) Pub. No.: US 2006/0134670 A1
(43) Pub. Date: Jun. 22, 2006

(54) Enabling tools to identify ligands for hormone nuclear receptors

(76) Inventor: Fabrice Piu, San Diego, CA (US)

Correspondence Address: KNOBBE MARTENS OLSON & BEAR LLP, 2040 MAIN STREET, FOURTEENTH FLOOR, IRVINE, CA, 92614, US

(21) Appl. No.: 11/283,329

(22) Filed: Nov. 18, 2005

Related U.S. Application Data
(60) Provisional application No. 60/629,811, filed on Nov. 19, 2004.

(51) Int. Cl. C12Q 1/68; G01N 33/53

(52) U.S. Cl. 435/6; 435/7.1

(57) ABSTRACT

A method and kit developed to identify substances that act as ligands, corepressors, coactivators, agonist and antagonists for cloned nuclear hormone receptors, as well as a test kit for use in the methods is provided herein. More specifically, the method involves expressing a nuclear hormone receptor, receptor heterodimer, and/or receptor homodimer, DNA encoding one or more signaling molecules and DNA encoding a marker, incubating the cells with a test substance, and identifying whether the test substance interacts with the receptor quantitatively or qualitatively by identifying the amount of marker and/or the proliferation of the cells.

### FIELD OF INVENTION

[0001] The present invention relates to methods developed to identify substances that act as ligands or helper proteins (agonists, antagonists, inverse agonists and selective modulators) for cloned nuclear hormone receptors, as well as a test kit for use in the methods.

### Incorporation by Reference of Material Submitted on a Compact Disc

[0002] The present application is being filed along with duplicate copies of a CD-ROM marked “Copy 1” and “Copy 2” containing a Sequence Listing in electronic format. The duplicate copies of the CD-ROM each contain a file entitled ACADIA.043A.txt created on Nov. 18, 2005 which is 177,000 Bytes in size. The information on these duplicate CD-ROMs is incorporated herein by reference in its entirety.

### BACKGROUND OF THE INVENTION

[0003] An important focus of the pharmaceutical drug discovery process is the identification of surrogate ligands for receptor proteins. In the case of nuclear hormone receptors, most of the receptors have been cloned (especially for those receptors present in humans) and pharmacologically characterized. Now, the pharmaceutical industry is attempting to isolate substances that act as ligands for nuclear hormone receptors by screening vast libraries of chemical entities (natural and artificial). Unfortunately, the available methods and technologies create significant constraints that hamper the ability to efficiently screen these libraries against so many targets.

[0004] Nuclear hormone receptors, more commonly referred to as nuclear receptors, define a family of ligand activated transcription factors (Tenbaum et al, Int J Biochem Cell Biol, 29:1325-41 (1997); Willson et al, Mol Endocrinol, 16:1135-44 (2002)). Structurally, they are characterized by the presence of modular domains: a zinc-finger DNA binding domain, a ligand binding domain and two transcriptional activation domains AF-1 and AF-2, ligand-independent and ligand-dependent, respectively. Depending upon the nuclear receptor, monomers or dimers (homodimers or heterodimers with the RXR nuclear receptor) constitute the functional effectors. This gene family regulates a wide variety of physiological functions and has thus a broad therapeutic potential ranging from metabolic, endocrinological diseases to neurological disorders, to cancer.

[0005] Nuclear receptors operate by recruiting an array of auxiliary polypeptides, denoted corepressors and coactivators, and it is these auxiliary proteins that mediate the molecular events that result in transcriptional repression or activation. For most nuclear receptors, this recruitment event is initiated upon the binding of the nuclear receptor to a ligand. It can be envisioned that certain ligands can only trigger the recruitment of a particular set of coactivators or corepressors and thus promote very selective effects. Furthermore, phosphorylation/dephosphorylation events can also affect the activity of the nuclear receptor itself and/or the auxiliary proteins. Similarly, it is plausible to assume that certain ligands exclusively responsive to such modifications could be identified. Generally speaking, these selective modulators would be of tremendous interest from a therapeutic standpoint, exhibiting maximized therapeutic value and minimum adverse effects.

[0006] The first step in the characterization of ligand interaction with a cloned receptor is to express the receptor in a ligand sensitive form. While a few receptors can be expressed in easily manipulated model systems such as yeast and E. coli, the interactions of ligands with most receptors are influenced by post-translational modifications that are only present in mammalian cells. Moreover, many of these receptors require mammalian proteins to accurately transduce their biological effects. Thus for wide applicability, an assay system is best when it is based on cloned receptors expressed in a mammalian system.

[0007] Historically, the ability of ligands to interact with nuclear receptors has been evaluated by competition with a radiolabeled ligand for a binding site on the receptor. Such assays are popular because they involve relatively few steps. However binding assays have many limitations: (i) for many technical reasons, binding assays are performed in non-physiological conditions which can influence receptor pharmacology; (ii) agonists and antagonists cannot be reliably discriminated; (iii) only binding sites for which radiolabeled ligands are available can be studied; (iv) binding assays are not easily applicable to orphan receptors for which ligands haven't yet been identified; (v) purchase, handling and disposal of radioisotopes are major expenses.

[0008] To reliably discriminate between agonist and antagonist ligands, a functional response of the nuclear receptor is measured. Responses to agonist activation of receptors are commonly measured as altered activity of various endogenous cellular proteins. Examples include measurement of interaction between nuclear receptors and coactivators, of transcriptional activation of the nuclear receptor. The former has led to the development of fluorescence based assays such as Fluorescence Polarization (FP) and Time Resolved Fluorescence Resonance Energy Transfer (TR-FRET). The latter involves conveniently assayed marker proteins that can be controlled by the transcriptional activation of the nuclear receptor. This approach resulted in convenient assays of receptors that function as transcription factors.

[0009] A theoretical limitation inherent to all of the above methods is their inability to assay a given ligand against more than a few receptors at the same time. For example, FP and TR-FRET assays rely on specific interactions between nuclear receptors and specific co-activators. Also, these assays have very poor pharmacological characteristics. More generally, because of their limited dynamic range, incompatible assay conditions, and the fact that many receptors cannot be distinguished from one another based upon their functional responses, these are not amenable to multiplexed assays.

### SUMMARY OF THE INVENTION

[0010] Aspects of the invention relate to methods for enabling or improving assays of nuclear receptor function, by performing the assays in a cell which expresses one or more helper proteins and one or more nuclear receptors. In some embodiments, a nucleic acid encoding one or more nuclear receptors or a nucleic acid encoding one or more helper proteins can be introduced into the cell. In other embodiments, a nucleic acid encoding one or more nuclear receptors and a nucleic acid encoding one or more helper proteins can be introduced into the cell. In some embodiments, the one or more nuclear receptors and one or more helper proteins are encoded by different nucleic acids, whereas in other embodiments, the nuclear receptor(s) and helper protein(s) are encoded by the same nucleic acid. In some embodiments, the cells can be contacted with a substance and it can be determined whether the substance modulates the activity of the receptor positively or negatively, thereby indicating whether the substance is a ligand for a nuclear receptor.

[0011] In some embodiments, assays of nuclear receptor function preformed in a cell which expresses one or more helper proteins and one or more nuclear receptors, can also include a cellular parameter to detect or validate the function of nuclear receptors whose functions or abilities to function are unknown. Some embodiments relate to assays of nuclear receptor function preformed in a cell which expresses one or more helper proteins and one or more nuclear receptors, also including a step of evaluating the signal transduction properties of said one or more nuclear receptors whose functions or abilities to function are unknown and thereby optimizing assays for those receptors.

[0012] In some embodiments of any of the methods described above, wherein the one or more nuclear receptors is encoded by a nucleic acid, at least one nucleotide sequence can be selected from the group including SEQ ID NOs: 1, 3, 5, 7, 9, 11, 13, 15, 17, 19, 21, 23, 25, 27, 29, 31, 33, 35, 37, 39, 41, 43, 45, 47, 49, 51, 53, 55, 57, 59, 61, 63, 65, 67, 69, 71, 73, 75, 77, 79, 81, 83, 85, 87, 89, 91, 93, 95, 97, 99, 101, 103, 105, 107, 109, 111, 113, 115, 117, 119, 121, 123, 125, 127, 129, 131, 133, 135, 137, 139, 141, and 143. In some embodiments of any of the methods described above, the one or more nuclear receptors can be encoded by a nucleic acid having at least 70% identity to a nucleotide sequence selected from the group including: SEQ ID NOs: 1, 3, 5, 7, 9, 11, 13, 15, 17, 19, 21, 23, 25, 27, 29, 31, 33, 35, 37, 39, 41, 43, 45, 47, 49, 51, 53, 55, 57, 59, 61, 63, 65, 67, 69, 71, 73, 75, 77, 79, 81, 83, 85, 87, 89, 91, 93, 95, 97, 99, 101, 103, 105, 107, 109, 111, 113, 115, 117, 119, 121, 123, 125, 127, 129, 131, 133, 135, 137, 139, 141, and 143.

[0013] In some embodiments of any of the methods described above, the helper proteins can enable a response to receptor activation that the receptor does not normally produce. In other embodiments of any of the methods described above, the helper proteins can amplify responses that the receptor normally produces. In still other embodiments, the helper proteins can amplify responses that the receptor does not normally produce but that are enabled by other helper proteins. In yet other embodiments, the helper proteins can block receptor responses that interfere with detection of the primary functional response of the receptor.

[0014] In some embodiments of any of the methods described above, the helper protein can a co-activator encoded by a nucleic acid that includes a nucleotide sequence selected from the group including: SEQ ID NOs: 145, 147, 149, 151, 153, 155, 157, 159, 161, 163, 165, 167, 169, 171, 173, 175, 177, 179, 181, 183, 185, 187, 189, 191, 193, 195, 197, 199, 201, 203, 205, 207, 209, 211, 213, 215, 217, 219, 221, 223, 225, 227, 229, 231, 233, 235, 237, 239, and 241, or a nucleic acid having at least 70% sequence identity to a nucleotide sequence selected from the group including: SEQ ID NOs: 145, 147, 149, 151, 153, 155, 157, 159, 161, 163, 165, 167, 169, 171, 173, 175, 177, 179, 181, 183, 185, 187, 189, 191, 193, 195, 197, 199, 201, 203, 205, 207, 209, 211, 213, 215, 217, 219, 221, 223, 225, 227, 229, 231, 233, 235, 237, 239, and 241.

[0015] In some embodiments of any of the methods described above, the helper protein can be a co-repressor encoded by a nucleic acid comprising a nucleotide sequence selected from the group consisting of SEQ ID NOs: 195, 197, 199, 201, and 203, or a nucleic acid having at least 70% sequence identity to a nucleotide sequence selected from the group including: SEQ ID NOs: 195, 197, 199, 201, and 203.

[0016] In some embodiments of any of the methods described above, the helper protein is a kinase encoded by a nucleic acid comprising a nucleotide sequence selected from the group including: SEQ ID NOs: 205, 207, 209, 211, 213, 215, 217, 219, 221, 223, 225, 227, 229, 231, 233, 235, 237, 239, and 241, or a nucleic acid having at least 70% sequence identity to a nucleotide sequence selected from the group including: SEQ ID NOs: 205, 207, 209, 211, 213, 215, 217, 219, 221, 223, 225, 227, 229, 231, 233, 235, 237, 239, and 241.

[0017] In other embodiments of any of the methods described above, the helper proteins can be chimeras between two or more proteins that redirect signal transduction pathways, linking domains that receive regulatory or signal inputs to domains that provide effector or signal outputs.

[0018] In embodiments of any of the methods described above, the helper proteins can be naturally occurring proteins that are not normally expressed in the cell used for the functional assay. In other embodiments, the helper proteins can bee naturally occurring proteins that are normally expressed in the cell used for the functional assay that are overexpressed.

[0019] In some embodiments of any of the methods described above, the helper proteins can be truncated or mutated versions of naturally occurring proteins that are not normally expressed in the cell used for the functional assay. For example, in some embodiments, the helper proteins can be truncated or mutated versions of naturally occurring proteins that are normally expressed in the cell used for the functional assay that are overexpressed.

[0020] In some embodiments of any of the methods described above, the helper proteins can be mixtures of 2 or more proteins, chimeras, mutant proteins, or truncated proteins which, when co-expressed, enable or improve detection of functional responses to nuclear hormone receptors. For example, in some embodiments, the helper proteins can be other naturally and non-naturally occurring receptors that help the receptor being functionally assayed to signal better. In other embodiments, the helper proteins can be other naturally and non-naturally occurring receptors that help the expression and formation of the receptor being functionally assayed. In other embodiments, the helper proteins can be other naturally and non-naturally occurring receptors that help the receptor being functionally assayed to respond more sensitively to ligands

[0021] Other embodiments relate to a method of assessing the effect of a candidate compound on the activity of a nuclear receptor comprising obtaining a cell expressing a nuclear receptor and a helper protein, wherein at least one of the nuclear receptor and the helper protein is expressed from a nucleic acid which has been introduced into the cell, contacting the cell with the candidate compound, and determining whether the candidate compound influences the activity of the nuclear hormone receptor. In some embodiments a method for identifying ligands for cloned nuclear receptors is provided. In some embodiments, a method for identifying ligands by simultaneous screening of compounds for activity at multiple cloned receptors is provided. In some embodiments, a method for measuring ligand concentration by activity at the nuclear receptors is provided. In other embodiments, a method for employing recombinant signaling molecules to facilitate assay of ligands for nuclear receptors is provided. In other embodiments, a method to identify DNAs encoding nuclear receptors for ligands is provided. In other embodiments a method of identifying mutant forms of nuclear receptors that have altered ligand dependence is provided.

[0022] One embodiment is a method of detecting a substance which is a ligand of a nuclear hormone receptor, the method comprising expressing one or more nuclear hormone receptors and one or more helper proteins in a cell, contacting the cell with a candidate substance, and determining whether said candidate substance influences the activity of the nuclear receptor. In one aspect of the embodiment, the DNA encoding the nuclear receptor comprises a sequence selected from the group consisting of SEQ ID NOs: 1, 3, 5, 7, 9, 11, 13, 15, 17, 19, 21, 23, 25, 27, 29, 31, 33, 35, 37, 39, 41, 43, 45, 47,49, 51, 53, 55, 57, 59, 61, 63, 65, 67, 69, 71, 73, 75, 77, 79, 81, 83, 85, 87, 89, 91, 93, 95, 97, 99, 101, 103, 105, 107, 109, 111, 113, 115, 117, 119, 121, 123, 125, 127, 129, 131, 133, 135, 137, 139, 141, and 143. In one aspect, the helper protein is a coactivator and the DNA encoding the coactivator comprises a sequence selected from the group consisting of SEQ ID NOs.: 145, 147, 149, 151, 153, 155, 157, 159, 161, 163, 165, 167, 169, 171, 173, 175, 177, 179, 181, 183, 185, 187, 189, 191, and 193. In yet a further aspect, the ligand is an agonist, antagonist, inverse agonist or selective modulator. In a further embodiment, the helper protein is a corepressor and the DNA encoding the corepressor comprises a sequence selected from the group consisting of SEQ ID NOs: 195, 197, 199, 201, and 203. In yet a further embodiment, the ligand is an agonist, antagonist, inverse agonist or selective modulator. In a further embodiment, the helper protein is a kinase and DNA encoding the kinase comprises a sequence selected from the group consisting of SEQ ID NOs: 205, 207, 209, 211, 213, 215, 217, 219, 221, 223, 225, 227, 229, 231, 233, 235, 237, 239, and 241. In yet a further embodiment, the helper protein is a ligand and the ligand is an agonist, antagonist, inverse agonist or selective modulator. In a further embodiment the helper proteins is a signaling molecules and the signaling molecule is defined as any polypeptide which directly or indirectly modulates the activity of nuclear hormone receptors. In yet a further aspect, the ligand is an agonist, antagonist, inverse agonist or selective modulator.

[0023] A further embodiment is a test kit for detecting a substance capable of acting as a ligand for a nuclear hormone receptor, the kit comprising: (a) expressing a nuclear receptor and one or more coactivators, or (b) expressing a nuclear receptor and one or more corepressors, or (c) expressing a nuclear receptor and one or more kinases, or (d) expressing a nuclear receptor and one or more signaling molecules. In one aspect of the embodiment, the ligand is an agonist, an antagonist, an inverse agonist or a selective modulator.

[0024] A further embodiment of the invention is a method for detecting a mutant form of a receptor or mutant form of a helper protein associated with the receptor, which mutant form will affect the response to a ligand on said cloned nuclear receptor present as one or more of the following combinations: (a) expressing a nuclear receptor and one or more coactivators, or (b) expressing a nuclear receptor and one or more corepressors, or (c) expressing a nuclear receptor and one or more kinases, or (d) expressing a nuclear receptor and one or more signaling molecules. One embodiment of the invention is a method for detecting a mutant form of a receptor or mutant form of a signal transducing protein associated with the receptor, which mutant form will affect the response to a ligand on said cloned nuclear receptor present as one or more of the following combinations: (a) expressing a nuclear receptor and one or more coactivators, or (b) expressing a nuclear receptor and one or more corepressors, or (c) expressing a nuclear receptor and one or more kinases, or (d) expressing a nuclear receptor and one or more signaling molecules.

[0025] A further embodiment of the invention is a method of detecting a substance which is a ligand of a nuclear hormone receptor, the method comprising one of the following: expressing a nuclear hormone receptor and one or more coactivators, expressing a nuclear hormone receptor and one or more corepressors, expressing a nuclear hormone receptor and one or more kinases, expressing a nuclear hormone receptor and one or more signaling molecules.

[0026] One embodiment is a method for enabling or improving assays of nuclear receptor function by performing assays in a cell which expresses one or more helper proteins and one or more nuclear receptors. In one embodiment, a nucleic acid encoding the one or more nuclear receptors or a nucleic acid encoding the one or more helper proteins is introduced into the cell.

[0027] In a further embodiment, a nucleic acid encoding the one or more nuclear receptors and a nucleic acid encoding the one or more helper proteins has been introduced into the cell. The one or more nuclear receptors and the one or more helper proteins can be encoded by different nucleic acids or can be encoded by the same nucleic acid. In a further embodiment, the method can also include contacting the cell with a substance and determining whether the substance is a ligand for a nuclear receptor. The ligand can modulate the activity of the nuclear receptor positively or negatively. The method can also involve evaluating a cellular parameter to detect or validate the function of nuclear receptors whose functions or abilities to function are unknown. Alternatively, or in addition, the method can involve evaluating the signal transduction properties of the one or more nuclear receptors whose functions or abilities to function are unknown and thereby optimizing assays for those receptors. The one or more nuclear receptors can be encoded by a nucleic acid including at least one nucleotide sequence selected from the group consisting of SEQ ID NOs: 1, 3, 5, 7, 9, 11, 13, 15, 17, 19, 21, 23, 25, 27, 29, 31, 33, 35, 37, 39, 41, 43, 45, 47, 49, 51, 53, 55, 57, 59, 61, 63, 65, 67, 69, 71, 73, 75, 77, 79, 81, 83, 85, 87, 89, 91, 93, 95, 97, 99, 101, 103, 105, 107, 109, 111, 113, 115, 117, 119, 121, 123, 125, 127, 129, 131, 133, 135, 137, 139, 141, and 143 or at least 70% identical. The helper proteins can enable a response to receptor activation that the receptor does not normally produce and/or can amplify responses that the receptor normally produces. In one embodiment, the helper proteins amplify responses that the receptor does not normally produce but that are enabled by other helper proteins or alternatively, they block receptor responses that interfere with detection of the primary functional response of the receptor. The helper protein can be a co-activator encoded by a nucleic acid including a nucleotide sequence selected from the group consisting of SEQ ID NOs: 145, 147, 149, 151, 153, 155, 157, 159, 161, 163, 165, 167, 169, 171, 173, 175, 177, 179, 181, 183, 185, 187, 189, 191, 193, 195, 197, 199, 201, 203, 205, 207, 209, 211, 213, 215, 217, 219, 221, 223, 225, 227, 229, 231, 233, 235, 237, 239, and 241 or 70% identical. The helper protein can be a co-repressor encoded by a nucleic acid including a nucleotide sequence selected from the group consisting of SEQ ID NOs: 195, 197, 199, 201, and 203 or 70% identical. The helper protein can be a kinase encoded by a nucleic acid including a nucleotide sequence selected from the group consisting of SEQ ID NOs: 205, 207, 209, 211, 213, 215, 217, 219, 221, 223, 225, 227, 229, 231, 233, 235, 237, 239, and 241 or 70% identical. In further embodiments, the helper proteins are chimeras between two or more proteins that redirect signal transduction pathways, linking domains that receive regulatory or signal inputs to domains that provide effector or signal outputs. The helper proteins can be naturally occurring proteins that are not normally expressed in the cell used for the functional assay, naturally occurring proteins that are normally expressed in the cell used for the functional assay that are overexpressed, truncated or mutated versions of naturally occurring proteins that are not normally expressed in the cell used for the functional assay, or truncated or mutated versions of naturally occurring proteins that are normally expressed in the cell used for the functional assay that are overexpressed or mixtures thereof. In one embodiment, the helper proteins are other naturally and non-naturally occurring receptors that help the receptor being functionally assayed to signal better, other naturally and non-naturally occurring receptors that help the expression and formation of the receptor being functionally assayed, or other naturally and non-naturally occurring receptors that help the receptor being functionally assayed to respond more sensitively to ligands.

[0028] One embodiment is a method of assessing the effect of a candidate compound on the activity of a nuclear receptor by obtaining a cell expressing one or more nuclear receptors and one or more helper proteins, wherein at least one of the nuclear receptor and the helper protein is expressed from a nucleic acid which has been introduced into the cell; contacting the cell with the candidate compound; and determining whether the candidate compound influences the activity of the nuclear hormone receptor.

[0029] In one embodiment, both the one or more nuclear receptor and the one or more helper protein are expressed from a nucleic acid which has been introduced into the cell. Alternatively, the one or more nuclear receptor and the one or more helper protein are expressed from the same nucleic acid which has been introduced into the cell. Alternatively, the one or more nuclear receptor is expressed from a first nucleic acid which has been introduced into the cell and the helper protein is expressed from a second nucleic acid which has been introduced into the cell.

[0030] In one embodiment, the determining step comprises comparing the activity of the nuclear hormone receptor in a first cell which expresses the nuclear receptor and the helper protein and which has been contacted with the candidate compound to the activity of the nuclear receptor in a second cell which expresses the nuclear receptor and the helper protein and which has not been contacted with the candidate compound, wherein the candidate compound is determined to influence the activity of the nuclear receptor if the activity of the nuclear receptor in the first cell is significantly different from the activity of the nuclear receptor in the second cell.

[0031] In one embodiment, the one or more nuclear receptors is encoded by a nucleic acid selected from the group consisting of SEQ ID NOs.: 1, 3, 5, 7, 9, 11, 13, 15, 17, 19, 21, 23, 25, 27, 29, 31, 33, 35, 37, 39, 41, 43, 45, 47, 49, 51, 53, 55, 57, 59, 61, 63, 65, 67, 69, 71, 73, 75, 77, 79, 81, 83, 85, 87, 89, 91, 93, 95, 97, 99, 101, 103, 105, 107, 109, 111, 113, 115, 117, 119, 121, 123, 125, 127, 129, 131, 133, 135, 137, 139, 141, and 143 and the one or more helper proteins is encoded by a nucleic acid selected from the group consisting of 145, 147, 149, 151, 153, 155, 157, 159, 161, 163, 165, 167, 169, 171, 173, 175, 177, 179, 181, 183, 185, 187, 189, 191, 193, 195, 197, 199, 201, 203, 205, 207, 209, 211, 213, 215, 217, 219, 221, 223, 225, 227, 229, 231, 233, 235, 237, 239, and 241 or sequences 70% identical to the above sequences.

[0032] In a further embodiment, the one or more nuclear receptors comprises an amino acid sequence selected from the group consisting of SEQ ID NOs: 2, 4, 6, 8, 10, 12, 14, 16, 18, 20, 22, 24, 26, 28, 30, 32, 34, 36, 38, 40, 42, 44, 46, 48, 50, 52, 54, 56, 58, 60, 62, 64, 66, 68, 70, 72, 74, 76, 78, 80, 82, 84, 86, 88, 90, 92, 94, 96, 98, 100, 102, 104, 106, 108, 110, 112, 114, 116, 118, 120, 122, 124, 126, 128, 130, 132, 134, 136, 138, 140, 142, and 144 and wherein the one or more helper proteins comprises an amino acid sequence selected from the group consisting of SEQ ID NOs: 146, 148, 150, 152, 154, 156, 158, 160, 162, 164, 166, 168, 170, 172, 174, 176, 178, 180, 182, 184, 186, 188, 190, 192, 194, 196, 198, 200, 202, 204, 206, 208, 210, 212, 214, 216, 218, 220, 222, 224, 226, 228, 230, 232, 234, 236, 238, 240, and 242 or an amino acid sequence having at least 70% identity to any of the above sequences.

[0033] In one embodiment, the combination of the nucleic acid sequence encoding the one or more nuclear receptors and the one or more helper proteins are selected from the group consisting of: SEQ ID NO: 5 and SEQ ID NOs: 161 or 213; SEQ ID NO: 9 and SEQ ID NOs: 145, 147, 161, or 213; SEQ ID NOs: 21, 23, 25, or 27 and SEQ ID NOs: 145, 147, or 213; SEQ ID NO: 49 and SEQ ID NOs: 145, 147, 161, or 213; SEQ ID NO: 45 and SEQ ID NOs: 145 or 213; SEQ ID NO: 51 and SEQ ID NOs: 145 or 147; SEQ ID NOs: 53, 55, or 57 and SEQ ID NOs: 145 or 147; SEQ ID NO: 69 and SEQ ID NOs: 161 or 213; SEQ ID NO: 93 and SEQ ID NOs: 145, 147, 161, or 213; SEQ ID NO: 107 and SEQ ID NO: 161; SEQ ID NO: 103 and SEQ ID NOs: 145, 147, or 161; SEQ ID NO: 101 and SEQ ID NOs: 145 or 147; SEQ ID NO: 143 and SEQ ID NOs: 145, 147 or 161; SEQ ID NO: 29 and SEQ ID NO: 213; SEQ ID NO: 43 and SEQ ID NO: 161; SEQ ID NO: 61 and SEQ ID NOs: 145, 147, 161 or 213; SEQ ID NO: 75 and SEQ ID NOs: 145 or 147; SEQ ID NO: 79 and SEQ ID NO: 161; SEQ ID NO: 87 and SEQ ID NO: 145, 147, or 161; SEQ ID NO: 89 and SEQ ID NOs: 145, 147 or 161; SEQ ID NO: 99 and SEQ ID NO:161; SEQ ID NOs: 123, 125, or 127 and SEQ ID NOs: 145, 147, 161, or 213; and SEQ ID NO: 135 and SEQ ID NOs: 145, 147 or 213.

[0034] In a further embodiment, the combination of the amino acid sequence of the one or more nuclear receptors and the one or more helper proteins are selected from the group consisting of: SEQ ID NO: 6 and SEQ ID NOs: 162 or 214; SEQ ID NO: 10 and SEQ ID NOs: 146, 148, 162, or 214; SEQ ID NOs: 22, 24, 26 or 28 and SEQ ID NOs: 146, 148, or 214; SEQ ID NO: 50 and SEQ ID NOs: 146, 148, 162, or 214; SEQ ID NO: 46 and SEQ ID NOs: 146, 148 or 214; SEQ ID NO: 52 and SEQ ID NOs: 146 or 148; SEQ ID NOs: 54, 56, or 58 and SEQ ID NOs: 146 or 148; SEQ ID NO: 70 and SEQ ID NOs: 162 or 214; SEQ ID NO: 94 and SEQ ID NOs: 146, 148, 162, or 214; SEQ ID NO: 108 and SEQ ID NO: 162; SEQ ID NO: 104 and SEQ ID NOs: 146, 148, or 162; SEQ ID NO: 102 and SEQ ID NOs: 146 or 148; SEQ ID NO: 144 and SEQ ID NOs: 146, 148, or 162; SEQ ID NO: 30 and SEQ ID NO: 214; SEQ ID NO: 44 and SEQ ID NO: 162; SEQ ID NO: 62 and SEQ ID NOs: 146, 148, 162, or 214; SEQ ID NO: 76 and SEQ ID NOs: 146 or 148; SEQ ID NO: 80 and SEQ ID NO: 162; SEQ ID NO: 89 and SEQ ID NO: 146, 148, or 162; SEQ ID NO: 90 and SEQ ID NOs: 146, 148, or 162; SEQ ID NO: 100 and SEQ ID NO:162; SEQ ID NOs: 124, 126, or 128 and SEQ ID NOs: 146, 148, 162, or 214; and SEQ ID NO: 136 and SEQ ID NOs: 146, 148 or 214.

[0035] In a further embodiment the combination of the nuclear receptor expressed by the cell and the helper protein expressed by the cell are selected from the group consisting of: TR beta and DRIP 205 or ERK2; RAR beta and SRC1, DRIP205 or ERK2; PPAR gamma/RXR and SRC1 or ERK2; FXR/RXR and SRC1, DRIP205 or ERK2; LXR beta/RXR and SRC1 or ERK2; VDR/RXR and SRC1; PXR and SRC1; RXR alpha and DRIP205 or ERK2; ER beta and SRC1, DRIP205 or ERK2; AR and DRIP205; MR and SRC1 or DRIP205; GR and SRC1; SHP and SRC1 or ERK2; RevERb alpha and ERK2; ROR gamma and DRIP205; HNF4 alpha and SRC1, DRIP205 or ERK2; TR2 alpha and SRC1; TLX and ERK2; COUP-TF beta and SRC1 or DRIP205; EAR2 and SRC1, DRIP205 or ERK2; ERR gamma and ERK2; NOR-1 and SRC1, DRIP205 or ERK2; and GCNF and SRC1 or ERK2.

[0036] In one embodiment the determining step involves determining whether the compound influences the activity of the one or more nuclear receptors by evaluating a cellular parameter selected from the group consisting of morphology, phosphorylation, differentiation, apoptosis, process formation, motility, gene expression, expression of a cellular receptor, and a phenotypic change. In a further embodiment, the method includes introducing a nucleic acid including a promoter from which the level of transcription is responsive to activation of the nuclear receptor into the cell, the promoter being operably linked to a nucleic acid encoding a detectable product and determining whether the candidate compound influences the activity of the nuclear receptor by measuring the amount of the detectable product.

[0037] A further embodiment is a method of identifying interaction between a nuclear receptor and one or more helper proteins, the method by: co-transfecting a first cell culture with DNA encoding a nuclear receptor and DNA encoding a marker of cell amplification, along with DNA encoding the one or more helper proteins; incubating the first cell culture for a period of time sufficient to permit cell amplification of the transfected cells; co-transfecting a second cell culture with DNA encoding a nuclear receptor and DNA encoding a marker of cell amplification; incubating the second cell culture for a period of time sufficient to permit cell amplification of the transfected cells; and determining whether the one or more helper proteins interact with the nuclear receptor by comparing the level of amplification of transfected cells expressing the nuclear receptor and the one or more helper proteins to the level of amplification of cells which were transfected with DNA encoding the nuclear receptor but which were not transfected with DNA encoding the one or more helper proteins.

[0038] In one embodiment, the helper protein is selected from the group consisting of SEQ ID NOs: 146, 148, 150, 152, 154, 156, 158, 160, 162, 164, 166, 168, 170, 172, 174, 176, 178, 180, 182, 184, 186, 188, 190, 192, 194, 196, 198, 200, 202, 204, 206, 208, 210, 212, 214, 216, 218, 220, 222, 224, 226, 228, 230, 232, 234, 236, 238, 240, and 242 or having 70% identify thereto.

[0039] In a further embodiment, the DNA encoding the nuclear receptor comprises a sequence selected from the group consisting of SEQ ID NOs. 1, 3, 5, 7, 9, 11, 13, 15, 17, 19, 21, 23, 25, 27, 29, 31, 33, 35, 37, 39, 41, 43, 45, 47, 49, 51, 53, 55, 57, 59, 61, 63, 65, 67, 69, 71, 73, 75, 77, 79, 81, 83, 85, 87, 89, 91, 93, 95, 97, 99, 101, 103, 105, 107, 109, 111, 113, 115, 117, 119, 121, 123, 125, 127, 129, 131, 133, 135, 137, 139, 141, and 143 or having 70% identify thereto.

[0040] In a further embodiment, the DNA encoding the nuclear receptor encodes a polypeptide including a sequence selected from the group consisting of SEQ ID NOs.: 2, 4, 6, 8, 10, 12, 14, 16, 18, 20, 22, 24, 26, 28, 30, 32, 34, 36, 38, 40, 42, 44, 46, 48, 50, 52, 54, 56, 58, 60, 62, 64, 66, 68, 70, 72, 74, 76, 78, 80, 82, 84, 86, 88, 90, 92, 94, 96, 98, 100, 102, 104, 106, 108, 110, 112, 114, 116, 118, 120, 122, 124, 126, 128, 130, 132, 134, 136, 138, 140, 142, and 144 or having 70% identify thereto.

[0041] In a further embodiment, the DNA encoding the one or more helper proteins comprises a sequence selected from the group consisting of SEQ ID NOs.: 145, 147, 149, 151, 153, 155, 157, 159, 161, 163, 165, 167, 169, 171, 173, 175, 177, 179, 181, 183, 185, 187, 189, 191, 193, 195, 197, 199, 201, 203, 205, 207, 209, 211, 213, 215, 217, 219, 221, 223, 225, 227, 229, 231, 233, 235, 237, 239, and 241 or having 70% identity thereto.

[0042] In a further embodiment, the DNA encoding the one or more helper proteins encodes a polypeptide including a sequence selected from the group consisting of SEQ ID NOs.: 146, 148, 150, 152, 154, 156, 158, 160, 162, 164, 166, 168, 170, 172, 174, 176, 178, 180, 182, 184, 186, 188, 190, 192, 194, 196, 198, 200, 202, 204, 206, 208, 210, 212, 214, 216, 218, 220, 222, 224, 226, 228, 230, 232, 234, 236, 238, 240, and 242 or having 70% identify thereto.

[0043] In a further embodiment, the DNA encoding the nuclear receptor and the DNA encoding the marker of cell amplification can be on the same vector, or on separate vectors.

[0044] In a further embodiment, the step of incubating the first cell culture for a period of time sufficient to permit cell amplification of the transfected cells comprises contacting the first cell culture with a ligand which binds to the nuclear receptor and wherein the step of incubating the second cell culture for a period of time sufficient to permit cell amplification of the transfected cells comprises contacting the second cell culture with a ligand which binds to the nuclear receptor. The ligand can be an agonist or an antagonist.

[0045] One embodiment is a method of identifying interaction between a nuclear receptor and one or more helper proteins, the method by: co-transfecting a first cell culture with DNA encoding a nuclear receptor and DNA encoding a marker of cell amplification, along with DNA encoding one or more helper proteins; incubating the cell culture with varying concentrations of a ligand which is an agonist or antagonist for the nuclear receptor for a period of time sufficient to permit cell amplification of the transfected cells in the first cell culture; co-transfecting a second cell culture with DNA encoding a nuclear receptor and DNA encoding a marker of cell amplification; incubating the cell culture with varying concentrations of a ligand which is an agonist or antagonist for the nuclear receptor for a period of time sufficient to permit cell amplification of the transfected cells in the second cell culture; determining whether the one or more helper proteins interact with the nuclear receptor by comparing the level of amplification of transfected cells expressing the nuclear receptor and the one or more helper proteins to the level of amplification of cells which were transfected with DNA encoding the nuclear receptor but which were not transfected with DNA encoding the one or more helper proteins. The one or more helper proteins can be coactivators, corepressors, kinases, signaling molecules, or at least two of the above.

[0046] In one embodiment, the DNA encoding the nuclear receptor comprises a sequence selected from the group consisting of SEQ ID NOs. 1, 3, 5, 7, 9, 11, 13, 15, 17, 19, 21, 23, 25, 27, 29, 31, 33, 35, 37, 39, 41, 43, 45, 47, 49, 51, 53, 55, 57, 59, 61, 63, 65, 67, 69, 71, 73, 75, 77, 79, 81, 83, 85, 87, 89, 91, 93, 95, 97, 99, 101, 103, 105, 107, 109, 111, 113, 115, 117, 119, 121, 123, 125, 127, 129, 131, 133, 135, 137, 139, 141, and 143. In a further embodiment, the DNA encoding the nuclear receptor encodes a polypeptide including a sequence selected from the group consisting of SEQ ID NOs.: 2, 4, 6, 8, 10, 12, 14, 16, 18, 20, 22, 24, 26, 28, 30, 32, 34, 36, 38, 40, 42, 44, 46, 48, 50, 52, 54, 56, 58, 60, 62, 64, 66, 68, 70, 72, 74, 76, 78, 80, 82, 84, 86, 88, 90, 92, 94, 96, 98, 100, 102, 104, 106, 108, 110, 112, 114, 116, 118, 120, 122, 124, 126, 128, 130, 132, 134, 136, 138, 140, 142, and 144.

[0047] In one embodiment, the DNA encoding the one or more helper proteins comprises a sequence selected from the group consisting of SEQ ID NOs.: 145, 147, 149, 151, 153, 155, 157, 159, 161, 163, 165, 167, 169, 171, 173, 175, 177, 179, 181, 183, 185, 187, 189, 191, 193, 195, 197, 199, 201, 203, 205, 207, 209, 211, 213, 215, 217, 219, 221, 223, 225, 227, 229, 231, 233, 235, 237, 239, and 241. In a further embodiment, the DNA encoding the one or more helper proteins encodes a polypeptide including a sequence selected from the group consisting of SEQ ID NOs.: 146, 148, 150, 152, 154, 156, 158, 160, 162, 164, 166, 168, 170, 172, 174, 176, 178, 180, 182, 184, 186, 188, 190, 192, 194, 196, 198, 200, 202, 204, 206, 208, 210, 212, 214, 216, 218, 220, 222, 224, 226, 228, 230, 232, 234, 236, 238, 240, and 242. The DNA encoding the nuclear receptor and the DNA encoding the marker of cell amplification can be on the same vector or on separate vectors.

[0048] A further embodiment is a method of identifying a substance which is a ligand of a nuclear receptor, the method by: incubating a cell culture which comprises a mixture of cells transfected with DNA encoding a nuclear receptor, DNA encoding a marker of cell amplification and DNA encoding one or more helper proteins and untransfected cells, with a test substance which is a potential agonist or antagonist for the nuclear receptor for a period of time sufficient to permit cell amplification of the transfected cells; and determining any increase or decrease in cell amplification by measuring the level of the marker in the transfected cells.

[0049] A further embodiment is a method of identifying a substance which is a selective modulator of a particular combination of a nuclear receptor and one or more helper proteins, the method by: co-transfecting a first cell culture including cells of a first cell type with DNA encoding a nuclear receptor and DNA encoding a marker of cell amplification, along with DNA encoding the one or more helper proteins; incubating the first cell culture with a test substance; determining whether the test substance increases or decreases amplification of the transfected cells of the first cell type relative to untransfected cells of the first cell type; co-transfecting a second cell culture including cells of a second cell type with DNA encoding the nuclear receptor and DNA encoding the marker of cell amplification, along with DNA encoding the one or more helper proteins; incubating the second cell culture with the test substance; determining whether the test substance increases or decreases amplification of the transfected cells of the second cell type relative to untransfected cells of the second cell type; wherein the test substance is a selective modulator of the nuclear receptor if the effects of the test substance on the first cell type are opposite to the effects of the test substance on the second cell type.

[0050] A further embodiment is a method of identifying a substance which is a selective modulator of a particular combination of a nuclear receptor and one or more helper proteins, the method by: co-transfecting a first cell culture with DNA encoding a nuclear receptor and DNA encoding a marker of cell amplification, along with DNA encoding one or more first helper proteins; incubating the first cell culture with a test substance; determining whether the test substance increases or decreases amplification of the transfected cells in the first cell culture relative to untransfected cells; co-transfecting a second cell culture with DNA encoding the nuclear receptor and DNA encoding a marker of cell amplification, along with DNA encoding a second one or more helper proteins, wherein the second one or more helper proteins are distinct from the first one or more helper proteins; incubating the second cell culture with the test substance; determining whether the test substance increases or decreases amplification of the transfected cells in the second cell culture relative to untransfected cells; wherein the test substance is a selective modulator of the nuclear receptor if the effects of the test substance on the first cell culture are opposite to the effects of the test substance on the second cell culture.

[0051] A further embodiment is a method of identifying a substance which is a selective modulator of a nuclear receptor by: co-transfecting a first cell culture including cells of a first cell type with DNA encoding a nuclear receptor and DNA encoding a marker of cell amplification; incubating the first cell culture with a test substance; determining whether the test substance increases or decreases amplification of the transfected cells of the first cell type relative to untransfected cells of the first cell type; co-transfecting a second cell culture including cells of a second cell type with DNA encoding the nuclear receptor and DNA encoding the marker of cell amplification; incubating the second cell culture with the test substance; determining whether the test substance increases or decreases amplification of the transfected cells of the second cell type relative to untransfected cells of the second cell type; wherein the test substance is a selective modulator of the nuclear receptor if the effects of the test substance on the first cell type are opposite to the effects of the test substance on the second cell type.

[0052] A further embodiment is a method of identifying interaction between two nuclear receptors by: co-transfecting a first cell culture with DNA encoding a first nuclear receptor, DNA encoding a second nuclear receptor and DNA encoding a marker of cell amplification; incubating the first cell culture for a period of time sufficient to permit cell amplification of the transfected cells in the first cell culture; co-transfecting a second cell culture with DNA encoding a marker of cell amplification and either DNA encoding the first nuclear receptor or DNA encoding the second nuclear receptor; incubating the second cell culture for a period of time sufficient to permit cell amplification of the transfected cells in the second cell culture; and determining whether the nuclear receptors interact with one another by comparing the level of amplification of transfected cells expressing both the nuclear receptors to the level of amplification of cells which were transfected with DNA encoding the marker of cell amplification and either DNA encoding the first nuclear receptor or DNA encoding the second nuclear receptor.

[0053] A further embodiment is a method of identifying interaction between two nuclear receptors and one or more helper proteins by: co-transfecting a first cell culture with DNA encoding a first nuclear receptor, DNA encoding a second nuclear receptor, DNA encoding one or more helper proteins and DNA encoding a marker of cell amplification; incubating the first cell culture for a period of time sufficient to permit cell amplification of the transfected cells; co-transfecting a second cell culture with DNA encoding one of the nuclear receptors, DNA encoding the one or more helper proteins and DNA encoding the marker of cell amplification or with DNA encoding both nuclear receptors and DNA encoding the marker of cell amplification; and determining whether the two nuclear receptors and one or more helper proteins interact with one another by comparing the level of amplification of transfected cells in the first cell culture to the level of amplification of transfected cells in the second cell culture.

[0054] One embodiment is a method of detecting a substance which is a ligand of two nuclear receptors by: incubating a cell culture which comprises a mixture of cells transfected with DNA encoding a first nuclear receptor, DNA encoding a second nuclear receptor, and DNA encoding a marker of cell amplification with a test substance which is a potential agonist or antagonist for the nuclear receptor for a period of time sufficient to permit cell amplification of the transfected cells; and determining any increase or decrease in cell amplification by measuring the level of the marker of cell amplification in the transfected cells.

[0055] A further embodiment is a method of detecting a substance which is a selective modulator of a particular combination of two nuclear receptors and one or more helper proteins by: co-transfecting a first cell culture having cells of a first cell type with DNA encoding a first nuclear receptor, DNA encoding a second nuclear receptor, DNA encoding one or more helper proteins, and DNA encoding a marker of cell amplification; incubating the first cell culture with a test substance; determining whether the test substance increases or decreases amplification of the transfected cells in the first cell culture relative to untransfected cells in the first cell culture; co-transfecting a second cell culture having cells of a second cell type with DNA encoding the first nuclear receptor, DNA encoding the second nuclear receptor and DNA encoding a marker of cell amplification; incubating the second cell culture with the test substance; and determining whether the test substance increases or decreases amplification of the transfected cells of the second cell type relative to untransfected cells of the second cell type; wherein the test substance is a selective modulator of the nuclear receptor if the effects of the test substance on the first cell type are opposite to the effects of the test substance on the second cell type.

[0056] One embodiment is a method of identifying a substance which is a selective modulator of a particular combination of two nuclear receptors and one or more helper proteins by: co-transfecting a first cell culture with DNA encoding a first nuclear receptor, DNA encoding a second nuclear receptor and DNA encoding a marker of cell amplification, along with DNA encoding one or more first helper proteins; incubating the first cell culture with a test substance; determining whether the test substance increases or decreases amplification of the transfected cells in the first cell culture relative to untransfected cells; co-transfecting a second cell culture with DNA encoding the first nuclear receptor, DNA encoding the second nuclear receptor and DNA encoding a marker of cell amplification, along with DNA encoding a second one or more helper proteins, wherein the second one or more helper proteins are distinct from the first one or more helper proteins; incubating the second cell culture with the test substance; determining whether the test substance increases or decreases amplification of the transfected cells in the second cell culture relative to untransfected cells; wherein the test substance is a selective modulator of the nuclear receptor if the effects of the test substance on the first cell culture are opposite to the effects of the test substance on the second cell culture.

### BRIEF DESCRIPTION OF THE DRAWINGS

[0057] FIG. 1 is an illustration of an embodiment of the multiple receptor format where agonist induction of the receptors was detected as β-galactosidase activity. Receptor DNAs encoding the glucocorticoid receptor GR alpha and the estrogen receptor ER beta were co-transfected with β-galactosidase marker DNA. Individual cell aliquots were then incubated for varying concentrations of the GR selective ligand dexamethasone and the ER selective ligand estrone.

[0058] FIG. 2 illustrates how embodiments herein can be used to assess the importance of signaling molecules and particular co-activators in modulating the activity of nuclear hormone receptors. DNAs encoding the PXR (rifampicin receptor) and RXR (retinoic acid receptor) receptors are co-transfected with the β-galactosidase marker DNA in the presence or absence of the co-activators GRIP1 and SRC1 (Glucocorticoid Receptor Interacting Protein 1 and Steroid Receptor Coactivator 1) alone or in combination. Rifampicin is a reference agonist ligand for the PXR/RXR heterodimer.

[0059] FIG. 3 is a histogram that illustrates how the present invention can be used to quantify the levels of constitutive activity displayed by nuclear hormone receptors. The Single Receptor Format method was used to transfect increasing concentrations of a nuclear receptor along with the b-galactosidase marker. The data illustrates the relative constitutive activities of the peroxisome PPAR gamma/RXR receptor and the androstane CAR alpha/RXR heterodimer receptor.

[0060] FIGS. 4A and 4B illustrate the inverse agonism of nuclear receptors PPARγ/RXR (4B) in the presence of increasing amounts of BRL 49653 and CARα/RXR (4A) in the presence of increasing amounts of Androstenol.

[0061] FIG. 5 is a typical pharmacological profile of an agonist response of the retinoid receptor as determined by R-SAT™.

[0062] FIG. 6 illustrates how embodiments herein can be used to identify interactions between receptors and signaling molecules. DNAs encoding the indicated RAR receptors were co-transfected with the β-galactosidase marker DNA with or without plasmid DNAs encoding β Arrestin 1 or β Arrestin 2. Cells were contacted with AM-580 and β-galactosidase activity was measured.

[0063] FIGS. 7A and 7B are blots of co-immunoprecipitation experiments that demonstrate the interaction between nuclear receptors (RARβ2) and other signaling proteins (Erk, Jnk, P38, and bArr2).

### DETAILED DESCRIPTION OF THE PREFERRED EMBODIMENTS

[0064] Disclosed herein are methods of detecting and identifying ligands for nuclear receptors, determining interactions between nuclear receptors and helper proteins, determining interactions between two nuclear receptors, and determining interactions between two nuclear receptors and helper proteins.

[0065] Methods are disclosed in which at least one nuclear receptor and at least one helper protein are expressed in a cell. In some embodiments, the cells expressing the at least one nuclear receptor and the at least one helper protein can be used to evaluate the effect of a candidate compound on the activity of the nuclear receptor. In other embodiments, the cells expressing the at least one nuclear receptor and the at least one helper protein can be used to identify helper proteins which interact with a particular nuclear hormone receptor. Other embodiments of the present invention relate to methods for identifying interaction between two nuclear receptors in which the two nuclear receptors are expressed in a cell and their ability to interact with one another is assessed by evaluating a cellular parameter. The interactions being assessed in each of the foregoing methods can be evaluated using any assay capable of detecting such interactions. In preferred embodiments, the interactions being assessed in each of the foregoing methods can be measured by assessing the extent of cellular proliferation in the RSAT assay described in U.S. Pat. Nos. 5,707,798; 5,912,132; and 5,955,281, the disclosures of which are incorporated herein by reference in their entireties). In some embodiments, the effect of the candidate compound on the activity of the receptor can be determined by comparing the activity of the receptor in cells which have been contacted with the candidate compound to the activity of the receptor in cells which have not been contacted with the candidate compound. In some embodiments, the cells are contacted with a known activator or a known inhibitor of the receptor as well as a candidate compound in order to determine the effect of the candidate compound on the action of the activator or inhibitor.

[0066] In one embodiment, a method is disclosed of assessing the effect of a candidate compound on the activity of a nuclear receptor by expressing one or more nuclear receptors and one or more helper proteins in a cell, contacting the cell with a candidate compound, and determining whether the candidate compound influences the activity of the receptor. As is true for each of the methods of the present invention, in some aspects of this embodiment at least one or both of the nuclear receptor and the helper protein can be expressed from a nucleic acid which has been introduced into the cell. Any candidate compounds can be used whether they are used to test known compounds or to identify new compounds that interact with the receptor. For example, candidate compounds can be used which include, but are not limited to, small molecules, pharmaceuticals, nucleic acids, peptides, ligands, agonists, and antagonists. In some embodiments, nucleic acids encoding other receptors (including other nuclear receptors),corepressors, co-activators, kinases, and/or signaling molecules are introduced into the cell.

[0067] In one embodiment, the method is used for identifying other ‘helper genes’ which encode helper proteins which interact with nuclear hormone receptors and/or for identifying ligands which interact with cloned nuclear hormone receptors in the presence of ‘helper genes’. The molecules which can be identified using the present methods, include but are not limited to, ligands, agonists, antagonists, inverse agonists, and selective modulators for cloned nuclear hormone receptors. The methods can be used for identifying these compounds by simultaneous screening of compounds for activity with respect to single cloned receptors, multiple cloned receptors and mixed receptors that can act as heterodimers. The method can also be used to identify mutant forms of nuclear receptors that have altered ligand dependence, as well as mutant forms of any helper proteins from a group of coactivators, corepressors, kinases or signaling molecules which modulate directly or indirectly the activity of nuclear receptors. The method results in a measurable output which is functionally linked to the assay. The measurable output can be any one known to one of skill in the art which can identify the activity of the ligands and/or ‘helper genes’ and can compare the cells with and without the test compound. In one embodiment, the measurable output is cellular proliferation. In a further embodiment, the measurable output includes, but is not limited to: expression of a gene, phosphorylation, morphology, differentiation, expression of a cellular receptor, apoptosis, any other phenotypic change, or an activity, such as cell motility. In a further embodiment, a reporter gene is expressed from a promoter of interest and the measurable output is analyzed as measured by the expression of the reporter gene.

[0068] In one embodiment, the method involves detecting a substance capable of acting as a ligand, agonist, antagonist, inverse agonist or selective modulator by:
[0069] (a) culturing cells to express one or more of the following: a nuclear receptor and one or more coactivators, a nuclear receptor and one or more corepressors, a nuclear receptor and one or more kinase, a nuclear receptor and one or more signaling molecules.
[0070] (b) incubating the cells with at least one test compound
[0071] (c) determining any change in the activity of the nuclear receptor so as to identify a test compound which is a ligand of said nuclear receptor.

[0072] In another aspect, a test kit is provided for detecting a substance capable of acting as a ligand, agonist, inverse agonist, antagonist and/or selective modulator, the kit including:
[0073] (a) cells expressing at least one of: at least one nuclear receptor and one or more coactivators, or cells expressing a nuclear receptor and one or more corepressors, or cells expressing a nuclear receptor and one or more kinases, or cells expressing a nuclear receptor and one or more signaling molecules.
[0074] (b) at least one test compound to incubate with the cells
[0075] (c) a method for determining any change in the activity of the nuclear receptor so as to identify a test compound which is a ligand of said nuclear receptor using a measurable output.

[0076] This test kit is useful for an embodiment of the present method in which the ability of the test substance (or potentially a large number of test substances) to act as a ligand, agonist, inverse agonist, antagonist and/or selective modulator for a specific receptor is determined by incubation of the test substances with one or more nuclear receptors simultaneously.

[0077] The nuclear receptors in each of the methods of the present invention can be any nuclear receptors known to one of skill in the art. The nuclear receptors can be expressed singly in a cell or alternatively multiple nuclear receptors can be expressed within the same cell or group of cells. For example, nuclear receptors which are known to interact, such as heterodimers, can be expressed in the same cells. Alternatively, nuclear receptors which share common ligands or helper proteins can be expressed in the same cell. Alternatively receptors which do not have any known interaction or commonality can be expressed in the same cells. Table 1 provides a non-limiting list of nuclear receptors which can be used in the assays described herein.

[0078] The one or more helper genes which express helper proteins can be any helper protein. Helper proteins which are known to interact with specific receptors can be used. Alternatively, helper proteins can be tested to identify whether they interact and modulate a particular receptors. Table 2 provides a non-limiting list of helper proteins which can be used in the assays described herein.

[0079] One advantage of using helper proteins in addition to the one or more nuclear receptors is that the activity of the receptor can be enhanced to provide a more easily measured effect. Another advantage is that compounds can be identified which specifically interact with the combination of the nuclear receptor and the helper protein. Non-limiting examples of combinations of nuclear receptors and helper proteins are provided in Table 4, which can be used in any of the embodiments of the assay.

[0080] Expression of at least one of the nuclear receptor and/or the helper protein is from a nucleic acid which has been introduced into a cell. In some embodiments, the nuclear receptor and the helper protein are expressed from the same nucleic acid. In other embodiments they are expressed from different nucleic acids. In some embodiments two or more nuclear receptors are expressed in the same cell. In some embodiments two or more helper proteins are expressed in the same cell. In a further embodiment one or more helper proteins is naturally expressed or over-expressed by the cell.

[0081] In further embodiments, a marker of cell amplification or alternatively a reporter gene is also expressed in the cell. The marker of cell amplification or the reporter gene can be expressed from a separate nucleic acid from the receptor or helper or can be expressed from the same nucleic acid as the nuclear receptor and/or the helper gene.

[0082] In one embodiment, the measurable output is used to identify a change in the receptor activity due to the compound being tested. In one embodiment, the measurable output is a morphological change. Thus, for example, the cells can be transfected with the test substance and the control cells without the test substance compared to those which express the test substance. The cells can be analyzed by microscopy and any morphological change can be identified. In one embodiment, the morphological change occurs due to differentiation of the cells.

[0083] In a further embodiment, the cells are analyzed with respect to a change in phosphorylation. The change in phosphorylation can be identified using any method known to one of skill in the art, for example, P³²-labelled ATP can be used in a phosphorylation assay and the amount of radioactive label incorporated into the cell can be analyzed. A change in phosphorylation can be a quantitative change, including increased or decreased phosphorylation or alternatively the change can be a qualitative change such as a change in the molecular weight of the proteins being phosphorylated or a change in the location of the proteins being phosphorylated. In one embodiment, antibodies which recognize phosphorylated proteins can be used. These antibodies can be quantitated and/or analyzed in a variety of ways known to one of skill in the art, including but not limited to, western blot, FACS analysis, and In situ techniques. Changes such as localization of the antibodies, amount and/or pattern can be analyzed. Alternatively, the amount of antibody which binds in a cell extract and or the size of the proteins which bind to the antibodies can be analyzed. In other embodiments, the phosphorylation of proteins within the cell in response to the level of a nuclear receptor can be assessed using two dimensional gel electrophoresis.

[0084] In a further embodiment, gene expression can be used as the measurable output. In one embodiment, a reporter gene is used. The reporter gene can be expressed from a promoter containing the hormone response elements specific for at least one nuclear hormone receptor in the assay. In some embodiments, the reporter construct can be transfected into a cell along with a nucleic acid encoding at least one receptor and a nucleic acid encoding at least one helper protein (a ‘helper gene’) and the cell can be contacted with one or more test substances. Any or all of the genes which are transfected can be on the same nucleic acid or separate nucleic acids. The measurable output, which in this case is correlated with the level of the transcription of the reporter can then be quantified with and without the test substance.

### Definitions

[0085] In the present description and claims, the following terms shall be defined as indicated below.

[0086] A “test substance” and/or “candidate compound” is intended to include any drug, compound or molecules with potential biological activity. The test substance can be any substance which can functionally interact with the nuclear hormone receptor in combination with a helper gene.

[0087] A “ligand” is intended to include any substance that either inhibits or stimulates the activity of a receptor. An “agonist” is defined as a ligand increasing the functional activity of a receptor (i.e. signal transduction through the receptor). An “antagonist” is defined as a ligand decreasing the functional activity of a receptor either by inhibiting the action of an agonist or by its own activity (inverse agonist). A “selective modulator” is defined as a ligand that modulates the activity of a particular combination of a nuclear receptor and one or more polypeptides from a group of coactivators, corepressor, kinase or signaling molecule.

[0088] A “modulator” and/or a ‘helper gene’ of nuclear hormone receptors can be any polypeptide which modulates directly or indirectly the activity of a nuclear receptor, including but not limited to a co-repressor, a kinase, a signaling molecule, a co-activator, a peptide and a receptor.

[0089] A “nuclear receptor” is intended to include any molecule present inside a cell either in the cytoplasm and/or in the nucleus which affects cellular physiology and further can be inhibited or stimulated by a ligand. Typically, a nuclear receptor comprises one or two transcriptional activation domains (AF-1 and AF-2) that generates a cellular signal in absence (AF-1) or in response (AF-2) to ligand binding, a ligand-binding domain (LBD) with ligand-binding properties, a DNA-binding domain (DBD) that interacts with specific sequences (cis-acting elements) onto the DNA. In addition, a “nuclear receptor” includes a truncated, modified, mutated receptor, or any molecule comprising partial or all of the sequences of a nuclear receptor.

### Embodiments

[0090] In some embodiments of each of the methods described herein, the DNA encoding at least one nuclear receptor can comprise a nucleic acid selected from the group consisting of SEQ ID NOs.: 1, 3, 5, 7, 9, 11, 13, 15, 17, 19, 21, 23, 25, 27, 29, 31, 33, 35, 37, 39, 41, 43, 45, 47, 49, 51, 53, 55, 57, 59, 61, 63, 65, 67, 69, 71, 73, 75, 77, 79, 81, 83, 85, 87, 89, 91, 93, 95, 97, 99, 101, 103, 105, 107, 109, 111, 113, 115, 117, 119, 121, 123, 125, 127, 129, 131, 133, 135, 137, 139, 141, and 143 or a nucleic acid homologous thereto In some embodiments, the homologous nucleic acid can have at least 97%, at least 95%, at least 90%, at least 85%, at least 80%, or at least 70% nucleotide sequence identity to a nucleotide sequence selected from the group consisting of SEQ ID NOS.: 1, 3, 5, 7, 9, 11, 13, 15, 17, 19, 21, 23, 25, 27, 29, 31, 33, 35, 37, 39, 41, 43, 45, 47, 49, 51, 53, 55, 57, 59, 61, 63, 65, 67, 69, 71, 73, 75, 77, 79, 81, 83, 85, 87, 89, 91, 93, 95, 97, 99, 101, 103, 105, 107, 109, 111, 113, 115, 117, 119, 121, 123, 125, 127, 129, 131, 133, 135, 137, 139, 141, and 143. In some embodiments, the homologous nucleic acid can have at least 97%, at least 95%, at least 90%, at least 85%, at least 80%, or at least 70% nucleotide sequence identity to a nucleic acid comprising at least 10, 15, 20, 25, 30, 35, 40, 50, 75, 100, 150, 200, 300, 400, or 500 consecutive nucleotides of one of SEQ ID NOs.: 1, 3, 5, 7, 9, 11, 13, 15, 17, 19, 21, 23, 25, 27, 29, 31, 33, 35, 37, 39, 41, 43, 45, 47, 49, 51, 53, 55, 57, 59, 61, 63, 65, 67, 69, 71, 73, 75, 77, 79, 81, 83, 85, 87, 89, 91, 93, 95, 97, 99, 101, 103, 105, 107, 109, 111, 113, 115, 117, 119, 121, 123, 125, 127, 129, 131, 133, 135, 137, 139, 141, and 143. Identity can be measured using BLASTN version 2.0 with the default parameters or tBLASTX with the default parameters. (Altschul, S. F. et al. Gapped BLAST and PSI-BLAST: A New Generation of Protein Database Search Programs, Nucleic Acid Res. 25: 3389-3402 (1997), the disclosure of which is incorporated herein by reference in its entirety) Alternatively, in some embodiments, the homologous nucleic acid can be a nucleic acid which is in a functional ortholog cluster which contains a nucleic acid selected from the group consisting of SEQ ID NOs.: 1, 3, 5, 7, 9, 11, 13, 15, 17, 19, 21, 23, 25, 27, 29, 31, 33, 35, 37, 39, 41, 43, 45, 47, 49, 51, 53, 55, 57, 59, 61, 63, 65, 67, 69, 71, 73, 75, 77, 79, 81, 83, 85, 87, 89, 91, 93, 95, 97, 99, 101, 103, 105, 107, 109, 111, 113, 115, 117, 119, 121, 123, 125, 127, 129, 131, 133, 135, 137, 139, 141, and 143. All other members of that ortholog cluster would be considered homologues. An exemplary library of functional ortholog clusters can be found at The National Center for Biotechnology website at the National Library of Medicine of the National Institutes of Health, which can be accessed on the internet by entering the following quoted text “www.ncbi.nim.nih” in the address bar of a web browser, such as INTERNET EXPLORER™ or NETSCAPE™ followed immediately by “.gov/COG”. Genes can be classified into clusters of orthologous groups or COG by using the COGNITOR program available at the National Center for Biotechnology website above, or by direct BLASTP comparison of the gene of interest to the members of the COGs and analysis of these results as described by Tatusov, R. L., Galperin, M. Y., Natale, D. A. and Koonin, E. V. (2000) The COG database: a tool for genome-scale analysis of protein functions and evolution. Nucleic Acids Research v. 28 n. 1, pp. 33-36.

[0091] In some embodiments of each of the methods described herein, the DNA encoding the nuclear receptor comprises nucleotide sequences which encode polypeptides having at least 99%, 95%, at least 90%, at least 85%, at least 80%, at least 70%, at least 60%, at least 50%, at least 40% or at least 25% amino acid identity or similarity to the amino acid sequence of one of SEQ ID NOs: 2, 4, 6, 8, 10, 12, 14, 16, 18, 20, 22, 24, 26, 28, 30, 32, 34, 36, 38, 40, 42, 44, 46, 48, 50, 52, 54, 56, 58, 60, 62, 64, 66, 68, 70, 72, 74, 76, 78, 80, 82, 84, 86, 88, 90, 92, 94, 96, 98, 100, 102, 104, 106, 108, 110, 112, 114, 116, 118, 120, 122, 124, 126, 128, 130, 132, 134, 136, 138, 140, 142, and 144 or to fragments comprising at least 5, 10, 15, 20, 25, 30, 35, 40, 50, 75, 100, or 150 consecutive amino acids thereof as determined using the FASTA version 3.0t78 algorithm with the default parameters. Alternatively, protein identity or similarity can be identified using BLASTP with the default parameters, BLASTX with the default parameters, TBLASTN with the default parameters, or tBLASTX with the default parameters. (Altschul, S. F. et al. Gapped BLAST and PSI-BLAST: A New Generation of Protein Database Search Programs, Nucleic Acid Res. 25: 3389-3402 (1997), the disclosure of which is incorporated herein by reference in its entirety).

[0092] In some embodiments of each of the methods described herein, the DNA encoding at least one nuclear receptor comprises a DNA which hybridizes under stringent or moderate conditions to a nucleic acid selected from the group consisting of the nucleotide sequences complementary to one of SEQ ID NOs: 1, 3, 5, 7, 9, 11, 13, 15, 17, 19, 21, 23, 25, 27, 29, 31, 33, 35, 37, 39, 41, 43, 45, 47, 49, 51, 53, 55, 57, 59, 61, 63, 65, 67, 69, 71, 73, 75, 77, 79, 81, 83, 85, 87, 89, 91, 93, 95, 97, 99, 101, 103, 105, 107, 109, 111, 113, 115, 117, 119, 121, 123, 125, 127, 129, 131, 133, 135, 137, 139, 141, and 143. In some embodiments of each of the methods described herein the DNA encoding the nuclear receptor comprises a DNA which hybridizes under stringent or moderate conditions to a fragment comprising at least 10, 15, 20, 25, 30, 35, 40, 50, 75, 100, 150, 200, 300, 400, or 500 consecutive nucleotides of the sequences complementary to a nucleic acid coding for a nuclear hormone receptor including but not limited to one of SEQ ID NOs.: 1, 3, 5, 7, 9, 11, 13, 15, 17, 19, 21, 23, 25, 27, 29, 31, 33, 35, 37, 39, 41, 43, 45, 47, 49, 51, 53, 55, 57, 59, 61, 63, 65, 67, 69, 71, 73, 75, 77, 79, 81, 83, 85, 87, 89, 91, 93, 95, 97, 99, 101, 103, 105, 107, 109, 111, 113, 115, 117, 119, 121, 123, 125, 127, 129, 131, 133, 135, 137, 139, 141, and 143. As used herein, “stringent conditions” means hybridization to filter-bound nucleic acid in 6×SSC at about 45° C. followed by one or more washes in 0.1×SSC/0.2% SDS at about 68° C. Other exemplary stringent conditions can refer, e.g., to washing in 6×SSC/0.05% sodium pyrophosphate at 37° C., 48° C., 55° C., and 60° C. as appropriate for the particular probe being used. As used herein, “moderate conditions” means hybridization to filter-bound DNA in 6×sodium chloride/sodium citrate (SSC) at about 45° C. followed by one, preferably 3-5 washes in 0.2×SSC/0.1% SDS at about 42-65° C.

[0093] In some embodiments of each of the methods described herein, the DNA encoding the nuclear receptor comprises a DNA which encodes a polypeptide having at least 99%, 95%, at least 90%, at least 85%, at least 80%, at least 70%, at least 60%, at least 50%, at least 40% or at least 25% amino acid identity or similarity to a sequence selected from the group consisting of SEQ ID NOs: 2, 4, 6, 8, 10, 12, 14, 16, 18, 20, 22, 24, 26, 28, 30, 32, 34, 36, 38, 40, 42, 44, 46, 48, 50, 52, 54, 56, 58, 60, 62, 64, 66, 68, 70, 72, 74, 76, 78, 80, 82, 84, 86, 88, 90, 92, 94, 96, 98, 100, 102, 104, 106, 108, 110, 112, 114, 116, 118, 120, 122, 124, 126, 128, 130, 132, 134, 136, 138, 140, 142, and 144. In some embodiments of each of the methods described herein, the DNA encoding a nuclear receptor comprises a DNA which encodes a polypeptide having at least 99%, 95%, at least 90%, at least 85%, at least 80%, at least 70%, at least 60%, at least 50%, at least 40% or at least 25% amino acid identity or similarity to a fragment comprising at least 5, 10, 15, 20, 25, 30, 35, 40, 50, 75, 100, or 150 consecutive amino acids of a sequence selected from the group consisting of SEQ ID NOs.: 2, 4, 6, 8, 10, 12, 14, 16, 18, 20, 22, 24, 26, 28, 30, 32, 34, 36, 38, 40, 42, 44, 46, 48, 50, 52, 54, 56, 58, 60, 62, 64, 66, 68, 70, 72, 74, 76, 78, 80, 82, 84, 86, 88, 90, 92, 94, 96, 98, 100, 102, 104, 106, 108, 110, 112, 114, 116, 118, 120, 122, 124, 126, 128, 130, 132, 134, 136, 138, 140, 142, and 144. Identity or similarity can be determined using the FASTA version 3.0t78 algorithm with the default parameters. Alternatively, protein identity or similarity can be identified using BLASTP with the default parameters, BLASTX with the default parameters, or TBLASTN with the default parameters. (Altschul, S. F. et al. Gapped BLAST and PSI-BLAST: A New Generation of Protein Database Search Programs, Nucleic Acid Res. 25: 3389-3402 (1997), the disclosure of which is incorporated herein by reference in its entirety).

[0094] Alternatively, the nuclear receptor can be a mutant nuclear receptor and can be used in the assay to compare the activity of the mutant to the activity of the wildtype receptor.

[0095] In some embodiments of each of the methods described herein where DNA encoding one or more helper proteins in addition to DNA encoding a nuclear receptor are expressed, the DNA encoding one or more helper proteins can comprise a DNA a sequence for a ‘helper gene’ selected from the group consisting of SEQ ID NOs.: 145, 147, 149, 151, 153, 155, 157, 159, 161, 163, 165, 167, 169, 171, 173, 175, 177, 179, 181, 183, 185, 187, 189, 191, 193, 195, 197, 199, 201, 203, 205, 207, 209, 211, 213, 215, 217, 219, 221, 223, 225, 227, 229, 231, 233, 235, 237, 239, and 241 or a DNA which has at least 97%, at least 95%, at least 90%, at least 85%, at least 80%, at least 70% , at least 60%, at least 50%, or at least 40% nucleotide sequence identity to a nucleotide sequence selected from the group consisting of SEQ ID NOs.: 145, 147, 149, 151, 153, 155, 157, 159, 161, 163, 165, 167, 169, 171, 173, 175, 177, 179, 181, 183, 185, 187, 189, 191, 193, 195, 197, 199, 201, 203, 205, 207, 209, 211, 213, 215, 217, 219, 221, 223, 225, 227, 229, 231, 233, 235, 237, 239, and 241. In another embodiment, the DNA encoding one or more helper proteins can comprise a DNA sequence which has at least 97%, at least 95%, at least 90%, at least 85%, at least 80%, at least 70% , at least 60%, at least 50%, or at least 40% nucleotide sequence identity to a nucleic acid comprising at least 10, 15, 20, 25, 30, 35, 40, 50, 75, 100, 150, 200, 300, 400, or 500 consecutive nucleotides of one of SEQ ID NOs.: 145, 147, 149, 151, 153, 155, 157, 159, 161, 163, 165, 167, 169, 171, 173, 175, 177, 179, 181, 183, 185, 187, 189, 191, 193, 195, 197, 199, 201, 203, 205, 207, 209, 211, 213, 215, 217, 219, 221, 223, 225, 227, 229, 231, 233, 235, 237, 239, and 241. Identity can be measured using BLASTN version 2.0 with the default parameters or tBLASTX with the default parameters. (Altschul, S. F. et al. Gapped BLAST and PSI-BLAST: A New Generation of Protein Database Search Programs, Nucleic Acid Res. 25: 3389-3402 (1997), the disclosure of which is incorporated herein by reference in its entirety) Alternatively, the DNA encoding the one or more helper proteins can comprise a nucleic acid which is included in a functional ortholog cluster which contains a nucleic acid selected from the group consisting of SEQ ID NOs.: 145, 147, 149, 151, 153, 155, 157, 159, 161, 163, 165, 167, 169, 171, 173, 175, 177, 179, 181, 183, 185, 187, 189, 191, 193, 195, 197, 199, 201, 203, 205, 207, 209, 211, 213, 215, 217, 219, 221, 223, 225, 227, 229, 231, 233, 235, 237, 239, and 241. All other members of that ortholog cluster can be used in each of the methods described herein. Such a library of functional ortholog clusters can be found at The National Center for Biotechnology website at the National Library of Medicine of the National Institutes of Health, which can be accessed on the internet by entering the following quoted text “www.ncbi.nim.nih” in the address bar of a web browser, such as INTERNET EXPLORER™ or NETSCAPE™ followed immediately by “.gov/COG”. A gene can be classified into a cluster of orthologous groups or COG by using the COGNITOR program available at the same web site, or by direct BLASTP comparison of the gene of interest to the members of the COGs and analysis of these results as described by Tatusov, R. L., Galperin, M. Y., Natale, D. A. and Koonin, E. V. (2000) The COG database: a tool for genome-scale analysis of protein functions and evolution. Nucleic Acids Research v. 28 n. 1, pp. 33-36.

[0096] In some embodiments of each of the methods described herein where DNA encoding one or more helper proteins in addition to DNA encoding a nuclear receptor are expressed, the DNA encoding the one or more helper proteins can comprise a DNA which encodes a polypeptide having at least 99%, 95%, at least 90%, at least 85%, at least 80%, at least 70%, at least 60%, at least 50%, at least 40% or at least 25% amino acid identity or similarity to a polypeptide comprising the amino acid sequence of one of SEQ ID NOs: 146, 148, 150, 152, 154, 156, 158, 160, 162, 164, 166, 168, 170, 172, 174, 176, 178, 180, 182, 184, 186, 188, 190, 192, 194, 196, 198, 200, 202, 204, 206, 208, 210, 212, 214, 216, 218, 220, 222, 224, 226, 228, 230, 232, 234, 236, 238, 240, and 242 or to fragments comprising at least 5, 10, 15, 20, 25, 30, 35, 40, 50, 75, 100, or 150 consecutive amino acids thereof as determined using the FASTA version 3.0t78 algorithm with the default parameters. Alternatively, protein identity or similarity can be identified using BLASTP with the default parameters, BLASTX with the default parameters, TBLASTN with the default parameters, or tBLASTX with the default parameters. (Altschul, S. F. et al. Gapped BLAST and PSI-BLAST: A New Generation of Protein Database Search Programs, Nucleic Acid Res. 25: 3389-3402 (1997), the disclosure of which is incorporated herein by reference in its entirety).

[0097] In some embodiments of each of the methods described herein where DNA encoding one or more helper proteins in addition to DNA encoding one or more nuclear receptors are expressed, the DNA encoding the one or more helper proteins can comprise a DNA which hybridizes under stringent or moderate conditions to a nucleic acid selected from the group consisting of the nucleotide sequences complementary to one of SEQ ID NOs: 145, 147, 149, 151, 153, 155, 157, 159, 161, 163, 165, 167, 169, 171, 173, 175, 177, 179, 181, 183, 185, 187, 189, 191, 193, 195, 197, 199, 201, 203, 205, 207, 209, 211, 213, 215, 217, 219, 221, 223, 225, 227, 229, 231, 233, 235, 237, 239, and 241. In some embodiments, the DNA encoding the one or more helper proteins can comprise a DNA which hybridizes under stringent or moderate conditions to a fragment comprising at least 10, 15, 20, 25, 30, 35, 40, 50, 75, 100, 150, 200, 300, 400, or 500 consecutive nucleotides of the sequences complementary to one of SEQ ID NOS.: 145, 147, 149, 151, 153, 155, 157, 159, 161, 163, 165, 167, 169, 171, 173, 175, 177, 179, 181, 183, 185, 187, 189, 191, 193, 195, 197, 199, 201, 203, 205, 207, 209, 211, 213, 215, 217, 219, 221, 223, 225, 227, 229, 231, 233, 235, 237, 239, and 241. As used herein, “stringent conditions” means hybridization to filter-bound nucleic acid in 6×SSC at about 45° C. followed by one or more washes in 0.1×SSC/0.2% SDS at about 68° C. Other exemplary stringent conditions can refer, e.g., to washing in 6×SSC/0.05% sodium pyrophosphate at 37° C., 48° C., 55° C., and 60° C. as appropriate for the particular probe being used. As used herein, “moderate conditions” means hybridization to filter-bound DNA in 6×sodium chloride/sodium citrate (SSC) at about 45° C. followed by one, preferably 3-5 washes in 0.2×SSC/0.1% SDS at about 42-65° C.

[0098] In some embodiments, the DNA may encode a portion of any of the foregoing nuclear receptors or helper proteins which retains the activity of the nuclear receptor or the helper protein. For example, in some embodiments, the DNA may encode a polypeptide comprising at least 20, at least 30, at least 40, at least 50, at least 75, at least 100, at least 150, at least 200, at least 250, at least 300, at least 350 or more than 350 consecutive amino acids of the nuclear receptor or the helper protein which retains the ability of nuclear receptor or helper protein to perform one or more of its normal physiological functions. Such physiological functions can include but are not limited to transcriptional activation, signaling effects, phosphorylation, interaction with other proteins.

[0099] In some embodiments, specific combinations of receptors and helper proteins are used in each of the methods of the present invention. In one embodiment, the combinations include, but are not limited to the combinations selected from the group consisting of: TR beta and DRIP 205 or ERK2; RAR beta and SRC1, DRIP205 or ERK2; PPAR gamma and SRC1 or ERK2; FXR and SRC1, DRIP205 or ERK2; LXR beta and SRC1 or ERK2; VDR and SRC1; PXR and SRC1; RXR alpha and DRIP205 or ERK2; ER beta and SRC1, DRIP205 or ERK2; AR and DRIP205; MR and SRC1 or DRIP205; GR and SRC1; SHP and SRC1 or ERK2; RevERb alpha and ERK2; ROR gamma and DRIP205; HNF4 alpha and SRC1, DRIP205 or ERK2; TR2 alpha and SRC1; TLX and ERK2; COUP-TF beta and SRC1 or DRIP205; EAR2 and SRC1, DRIP205 or ERK2; ERR gamma and ERK2; NOR-1 and SRC1, DRIP205 or ERK2; and GCNF and SRC1 or ERK2.

[0100] In a further embodiment, nucleic acid sequences encoding the one or more nuclear receptors and the one or more helper proteins are selected from the group consisting of: SEQ ID NO: 5 and SEQ ID NOs: 161 or 213; SEQ ID NO: 9 and SEQ ID NOs: 145, 147, 161, or 213; SEQ ID NOs: 21, 23, 25, or 27 and SEQ ID NOs: 145, 147, or 213; SEQ ID NO: 49 and SEQ ID NOs: 145, 147, 161, or 213; SEQ ID NO: 45 and SEQ ID NOs: 145 or 213; SEQ ID NO: 51 and SEQ ID NOs: 145 or 147; SEQ ID NOs: 53, 55, or 57 and SEQ ID NOs: 145 or 147; SEQ ID NO: 69 and SEQ ID NOs: 161 or 213; SEQ ID NO: 93 and SEQ ID NOs: 145, 147, 161, or 213; SEQ ID NO: 107 and SEQ ID NO: 161; SEQ ID NO: 103 and SEQ ID NOs: 145, 147, or 161; SEQ ID NO: 101 and SEQ ID NOs: 145 or 147; SEQ ID NO: 143 and SEQ ID NOs: 145, 147 or 161; SEQ ID NO: 29 and SEQ ID NO: 213; SEQ ID NO: 43 and SEQ ID NO: 161; SEQ ID NO: 61 and SEQ ID NOs: 145, 147, 161 or 213; SEQ ID NO: 75 and SEQ ID NOs: 145 or 147; SEQ ID NO: 79 and SEQ ID NO: 161; SEQ ID NO: 87 and SEQ ID NO: 145, 147, or 161; SEQ ID NO: 89 and SEQ ID NOs: 145, 147 or 161; SEQ ID NO: 99 and SEQ ID NO:161; SEQ ID NOs: 123, 125, or 127 and SEQ ID NOs: 145, 147, 161, or 213; and SEQ ID NO: 135 and SEQ ID NOs: 145, 147 or 213.

[0101] In a further embodiment, amino acid sequences of said one or more nuclear receptors and said one or more helper proteins are selected from the group consisting of: SEQ ID NO: 6 and SEQ ID NOs: 162 or 214; SEQ ID NO: 10 and SEQ ID NOs: 146, 148, 162, or 214; SEQ ID NOs: 22, 24, 26 or 28 and SEQ ID NOs: 146, 148, or 214; SEQ ID NO: 50 and SEQ ID NOs: 146, 148, 162, or 214; SEQ ID NO: 46 and SEQ ID NOs: 146, 148 or 214; SEQ ID NO: 52 and SEQ ID NOs: 146 or 148; SEQ ID NOs: 54, 56, or 58 and SEQ ID NOs: 146 or 148; SEQ ID NO: 70 and SEQ ID NOs: 162 or 214; SEQ ID NO: 94 and SEQ ID NOs: 146, 148, 162, or 214; SEQ ID NO: 108 and SEQ ID NO: 162; SEQ ID NO: 104 and SEQ ID NOs: 146, 148, or 162; SEQ ID NO: 102 and SEQ ID NOs: 146 or 148; SEQ ID NO: 144 and SEQ ID NOs: 146, 148, or 162; SEQ ID NO: 30 and SEQ ID NO: 214; SEQ ID NO: 44 and SEQ ID NO: 162; SEQ ID NO: 62 and SEQ ID NOs: 146, 148, 162, or 214; SEQ ID NO: 76 and SEQ ID NOs: 146 or 148; SEQ ID NO: 80 and SEQ ID NO: 162; SEQ ID NO: 89 and SEQ ID NO: 146, 148, or 162; SEQ ID NO: 90 and SEQ ID NOs: 146, 148, or 162; SEQ ID NO: 100 and SEQ ID NO:162; SEQ ID NOs: 124, 126, or 128 and SEQ ID NOs: 146, 148, 162, or 214; and SEQ ID NO: 136 and SEQ ID NOs: 146, 148 or 214.

[0102] Additional embodiments of the present invention are described in Appendix A which is being filed along with the present application.

### Description

### Nuclear Receptors

[0103] The nuclear receptor family includes receptors for classic endocrine hormones, such as estrogens, androgens, glucocorticoids, T3/T4 thyroid hormones, retinoids, and vitamin D₃. As a group, they include a wide variety of nuclear receptors that respond to a plethora of small hydrophobic ligands and control a corresponding assortment of target genes. The nuclear receptor family also contains members that harken back to their primordial ancestors and respond to intermediates in lipid metabolism rather than endocrine hormones per se; examples of the latter include the peroxisome proliferator-activated receptors (PPARs), liver X receptor (LXR), and farnesoid X receptors (FXRs). Finally, there are orphan receptors, such as the chicken ovalbumin upstream regulatory sequence transcription factors (COUP-TFs), for which no ligands have been identified.

[0104] Exempting the orphan receptors, the generic nuclear receptor operates as a single-step signal transducer, transmitting an input (the binding of a small chemical ligand) into an output (such as a change in the transcription rate of specific target genes). In many pathways, but without being limited to a specific pathway, to do so, the nuclear receptor (a) recognizes the specific DNA sequences, denoted hormone response elements (HREs), in or near the target gene, (b) binds to the hormone or lipid ligand, and ultimately (c) mediates the molecular events that alter the rate of transcription of the target promoter.

[0105] Briefly, most nuclear receptors bind to DNA either as homodimers or as heterodimers with other members of the nuclear receptor family (especially with the RXR members), a few can also recognize DNA as receptor monomers, or as oligomers. A zinc-finger motif in each receptor monomer recognizes a six to eight nucleotide sequence on the DNA, denoted a half site. To recruit a receptor dimer, a functional HRE contains two half sites arranged in a specific orientation and spacing. For instance, thyroid hormone receptors (T3Rs) preferentially bind to two AGGTCA half sites oriented as direct repeats with a four-base spacer (DR-4s); retinoic acid receptors (RARs) bind to the same AGGTCA half sites, but oriented as a DR-5; estrogen receptors bind to AGGTCA half sites oriented as an inverted repeat with a three-base spacer (INV-3); and androgen receptors (ARs) recognize an INV-3 orientation containing AGAACA half sites. This precis is necessarily a simplification: HREs in nature often contain half sites that diverge in sequence and topology from these prototypic elements. Nuclear receptors also interact with nonreceptor transcription factors, such as c-Jun and c-Fos, either to tether the receptor indirectly to the DNA or to form complexes in which both the receptor and nonreceptor contribute specific DNA contacts. These interactions can result in complex, combinatorial modes of transcriptional regulation.

[0106] Much elegant work has also been devoted to understanding how nuclear receptors recognize their hormone ligands. The operative entity in this regard is a C-terminal hormone-binding domain (HDB) composed of 12 α-helical domains twisted into a triple-layered sandwich. Hormone ligand is virtually engulfed by this polypeptide sandwich, with the hormone serving as a hydrophobic core on which the receptor completes its own folding. Due to this close approximation between ligand and receptor, different hormones can invoke different conformations in the receptor. These ligand-driven receptor conformations produce distinct biological consequences. For example, ligand agonists produce receptor conformations that favor transcriptional activation, whereas ligand antagonists produce receptor conformations that favor transcriptional repression.

[0107] Nuclear receptors operate by recruiting an array of auxiliary polypeptides, denoted corepressors and coactivators, and it is these auxiliary proteins that mediate the molecular events that result in transcriptional repression or activation. The molecular basis of this transcriptional drama is described in greater detail below.

[0108] Nuclear receptors possess subdomains that are used for transcriptional regulation, yet can be distinguished from sequences used for DNA binding or hormone recognition. These transcriptional regulatory domains have several aliases (activation domains, activation function domains, tau domains, repression domains, silencing domains) but a common mode of operation; they represent docking surfaces on the receptor through which corepressors and coactivators are recruited. Almost all nuclear receptors possess a hormone-dependent activation domain in the receptor HBD; this activation function (AF)-2 receptor domain forms a docking surface for coactivators and is assembled in three-dimensional space from portions of HDB helices 3/5/6 and 12. Intriguingly, this same surface overlaps an important corepressor binding site, and a yin yang mechanism operates by which hormone-induced changes in HBD helix 12 alternatively favor recruitment for one or the other class of coregulator. Many, but not all, nuclear receptors possess additional activation domains within their N-terminal domains (denoted AF-1 sequences) that bind coactivators, as well as less-characterized corepressor and coactivator interaction surfaces within their DNA-binding domains.

[0109] By exploiting these various docking surfaces as bait in two-hybrid or in coprecipitation experiments, researchers have compiled an increasingly thick dossier of coactivators and corepressors. The coactivators thus identified can be broadly categorized into four groups: (a) histone covalent modifiers, such as the P160 family, CARM, and CBP/p300, that possess (or recruit) enzymatic activities able to modify the chromatin template, including acetylases and methylases; (b) ATP-dependent chromatin-remodeling complexes, such as the Swi/Snf family, that alter the higher-order structure and position of nucleosomes; (c) components of the mediator complex, such as TRAP/DRIP, that interact with the general transcriptional machinery to assist in assembly of the preinitiation complex; and (d) coactivators with unknown functions.

[0110] The first corepressors identified for nuclear receptors were SMRT (also known as the T3R-associated cofactor, TRAC) and its close paralog, N—CoR (also known as the receptor interacting protein 13, RIP 13). SMRT and N—CoR are encoded by two distinct loci but share a common molecular architecture and approximately 45% amino acid identity, additional forms of SMRT and N—CoR are generated by alternative mRNA splicing, and including SMRTτ.

[0111] Both SMRT and N—CoR can be conceptually divided into a N-terminal portion having three to four distinct transcriptional repression (or silencing) domains (RDs), and a C-terminal portion composed of two or three nuclear receptor interaction domains (NDs). The RDs are docking surfaces that recruit additional components of the corepressor complex, including histone deacetylases (HDACs), transducin-like protein 1 (TBL-1), G protein pathway suppressor 2 (GPS2), and (possibly) mSin3 and its cohorts.

[0112] Receptor homodimers and heterodimers can display different N—CoR— and SMRT-binding properties. For example, T3Rs homodimers, but not T3R/RXR heterodimers, efficiently recruit SMRT and N—CoR when bound to DNA response elements and can be important mediators of T3R repression.

[0113] A third subgroup of nuclear receptors display low or no corepressor binding in the absence of hormones, but gain an increased ability to bind corepressors in the presence of hormone antagonists: these include estrogen receptors (ERs), glucocorticoid receptors (GRs), progesterone receptors (PRs), and androgen receptors (ARs).

[0114] Many nuclear receptors are expressed from multiple genetic loci, or by alternative mRNA splicing, to generate multiple receptor isotypes (or isoforms) that play distinct roles in development and physiology. These receptor isotypes can display different corepressor recruitment properties. For example, RARs are encoded by three distinct genes: α, β, and γ. Although RARE represses target gene expression in the absence of hormone, RARβ and γ do not repress, rather they activate transcription in both the absence and presence of hormone agonist. These differences in transcriptional regulation reflect the corepressor binding properties of these isoforms: RARE binds corepressor strongly in vitro and in vivo, whereas RARβ and γ do not.

[0115] Transfection of cells in the present invention can be performed according to any one of the numerous methods known in the art. In general, DNA sequences encoding one or more nuclear receptor and DNA sequences encoding coactivators, corepressors, kinases and other signaling molecules can be inserted in suitable cloning vectors that can conveniently be subjected to recombinant DNA procedures. Expression vectors carry promoter sequences that allow the expression of the nuclear receptor, coactivator, corepressor, kinase or other signaling molecules. The promoter can be any DNA sequence that shows transcriptional activity in the host cell of choice and can be derived from gene encoding proteins either homologous or heterologous to the host cell. The vector can also comprise elements such as polyadenylation signals, transcriptional enhancer sequences, translational enhancer sequences, origin of replication and integration sequences. The procedures used to insert the DNA sequences into suitable vectors are well known to those skilled in the art.

[0116] In further embodiments, cells can be transfected with at least one other nuclear receptor that is known to, suspected to, or will be tested to determine whether it will heterodimerize with the first nuclear receptor. In this way one can identify ligands, agonists, antagonists, inverse agonists or selective modulators that specifically interact with the heterodimer.

[0117] Examples of suitable promoters for directing the transcription of the DNA encoding the nuclear receptor and/or ‘helper genes’ such as genes encoding, coactivators, corepressors, kinases or other signaling molecules in mammalian cells, include but are not limited to: the SV40 promoter (Subramani et al., Mol. Cell Biol. 1 (1981), 854-864), the MT-1 (metallothionein gene) promoter Palmiter et al., Science 222 (1983), 809-814) or adeno-virus 2 major late promoter.

[0118] The DNA sequence encoding the nuclear receptor, helper proteins such as, coactivators, corepressors, kinases or other signaling molecules can also be operably connected to a suitable terminator, such as the human growth hormone terminator (Palmiter et al. op. cit.). The vector can further comprise elements such as polyadenylation signals (e.g. from SV40 or the adenovirus 5 Elb region), transcriptional enhancer sequences (e.g., the SV40 enhancer) and translation enhancer sequences (e.g., the ones encoding adenovirus VA RNAs).

[0119] The vector can further comprise a DNA sequence enabling the vector to replicate in the host cell in question. An example of such a sequence (when the host cell is a mammalian cell) is the SV40 origin of replication.

[0120] The procedures used to ligate the DNA sequences coding for the receptor, the promoter and the terminator, respectively, and to insert them into suitable vectors containing the information necessary for replication, are well known to persons skilled in the art (cf., for instance, Sambrook et al., Molecular Cloning: A Laboratory Manual, Cold Spring Harbor Laboratory, Cold Spring Harbor, N.Y., 1989).

[0121] Cells that can be used in the present method include any cells capable of mediating signal transduction via the nuclear receptor in the presence of one or more ‘helper genes’ encoding helper proteins such as coactivators, corepressors, kinases, or signaling molecules. Such cells are typically mammalian cells but eukaryotic (such as insect cells) or prokaryotic cells are also suitable. Examples of useful mammalian cells that can be used include, but are not limited to: the preferred mouse fibroblastic cell line NIH-3T3 (ATCC CRL 1658), RAT 1 cells, HEK 293 cells, CHO cells and COS cells.

[0122] Methods of transfecting mammalian cells and expressing DNA sequences introduced in the cells are described in e.g., Kaufman and sharp, J. Mol. Biol. 159 (1982), 601-621; Southern and Berg, J. Mol. Appl. Genet. 1 (1982), 327-341; Loyter et al., Proc. Natl. Acad. Sci USA 79 (1982), 422-426; Wigler et al., Cell 14 (1978), 725; Corsaro and Pearson, Somatic Cell Genetics 7 (1981), 603, Graham and ver der Eb, Virology 52 (1973), 456; Neumann et al., EMBO J. 1 (1982), 841-845; and Wigler et al., Cell 11, 1977, pp. 223-232.

[0123] Any nuclear hormone receptors known to one of skill in the art can be utilized in the present invention, including but not limited to: those in Tables 1 and 3, those described above under the heading “nuclear hormone receptors”, and those that are newly identified as nuclear hormone receptors. Although most of the nuclear hormone receptors specifically referred to herein are human, it will be appreciated that one could perform the assay with homologs of any of these receptors, such as mammalian, insect and other homologs of these receptors, some of which have already been identified. Homologs include anything with from about 30%-100% amino acid identity, including but not limited to 35%, 40%, 45%, 50%, 55%, 60%, 65%, 70%, 75%, 80%, 85%, 90%, 95%, and 99% of any human nuclear hormone receptor. Amino acid identity can be determined using any of the conventional software, including BLAST. Alternatively, the homology can be to the SEQ ID NOs disclosed herein, including but not limited to SEQ ID NOs: 1-48. The homologs can be identified using any methods known to one of skill in the art.

[0124] In some embodiments, nuclear hormone receptors for which activity can be modulated in a ligand dependent manner can be assayed in the present invention by co-expressing one or more signaling molecules in the cells expressing the nuclear hormone receptor. Signaling molecules can be any molecules that directly or indirectly modulate the activity of the nuclear receptor or receptors, including but not limited to: coactivators, corepressors, kinases, signaling molecules.

TABLE 1
List of human nuclear hormone receptors

| | | Unifying | GenBank # - SEQ ID | | | |
|---|---|---|---|---|---|---|
| | Gene | name | Nos) | Variant 2 | Variant 3 | Variant 4 |
| Group I | | | | | | |
| 1A | NR1A1 | TR alpha | NM 199334 - 1, 2 | NM 003250 - 3, 4 | | |
| | NR1A2 | TR beta | NM 000461 - 5, 6 | | | |
| 1B | NR1B1 | RAR alpha | NM 000964 - 7, 8 | | | |
| | NR1B2 | RAR beta | NM 000965 - 9, 10 | NM 016152 - 11, | | |
| | | | | 12 | | |
| | NR1B3 | RAR gamma | NM 000966 - 13, 14 | | | |
| 1C | NR1C1 | PPAR alpha | NM 005036 - 15, 16 | | | |
| | NR1C2 | PPAR | NM 006238 - 17, 18 | NM 177435 - 19, | | |
| | | beta/delta | | 20 | | |
| | NR1C3 | PPAR gamma | NM 005037 - 21, 22 | NM 015869 - 23, | NM 138711 - | NM 138712 - |
| | | | | 24 | 25, 26 | 27, 28 |
| 1D | NR1D1 | RevERB alpha | NM 021724 - 29, 30 | | | |
| | NR1D2 | RevERB beta | NM 005126 - 31, 32 | | | |
| 1F | NR1F1 | ROR alpha | NM 134261 - 33, 34 | NM 134262 - 35, | NM 134260 - | NM 002493 - |
| | | | | 36 | 37, 38 | 39, 40 |
| | NR1F2 | ROR beta | NM 006914 - 41, 42 | | | |
| | NR1F3 | ROR gamma | NM 005060 - 43, 44 | | | |
| 1H | NR1H2 | LXR beta | NM 007121 - 45, 46 | | | |
| | NR1H3 | LXR alpha | NM 005693 - 47, 48 | | | |
| | NR1H4 | FXR | NM 005123 - 49, 50 | | | |
| 1I | NR1I1 | VDR | NM 000376 - 51, 52 | | | |
| | NR1I2 | PXR | NM 003889 - 53, 54 | NM 022002 - 55, | NM 033013 - | |
| | | | | 56 | 57, 58 | |
| | NR1I3 | CAR alpha | NM 005122 - 59, 60 | | | |
| Group II | | | | | | |
| 2A | NR2A1 | HNF4 alpha | NM 178849 - 61, 62 | NM 000457 - 63, | NM 178850 - | |
| | | | | 64 | 65, 66 | |
| | NR2A2 | HNF4 gamma | NM 004133 - 67, 68 | | | |
| 2B | NR2B1 | RXR alpha | NM 002957 - 69, 70 | | | |
| | NR2B2 | RXR beta | NM 021976 - 71, 72 | | | |
| | NR2B3 | RXR gamma | NM 006917 - 73, 74 | | | |
| 2C | NR2C1 | TR2 alpha | NM 003297 - 75, 76 | | | |
| | NR2C2 | TR2 beta | NM 003298 - 77, 78 | | | |
| 2E | NR2E1 | TLX | NM 003269 - 79, 80 | | | |
| | NR2E3 | PNR | NM 016346 - 81, 82 | NM 014249 - 83, | | |
| | | | | 84 | | |
| 2F | NR2F1 | COUP-TF | NM 005654 - 85, 86 | | | |
| | | alpha | | | | |
| | NR2F2 | COUP-TF beta | NM 021005 - 87, 88 | | | |
| | NR2F6 | EAR2 | XM 373407 - 89, 90 | | | |
| Group III | | | | | | |
| 3A | NR3A1 | ER alpha | NM 000125 - 91, 92 | | | |
| | NR3A2 | ER beta | NM 001437 - 93, 94 | | | |
| 3B | NR3B1 | ERR alpha | NM 004451 - 95, 96 | | | |
| | NR3B2 | ERR beta | NM 004452 - 97, 98 | | | |
| | NR3B3 | ERR gamma | NM 001438 - 99, 100 | | | |
| 3C | NR3C1 | GR alpha | NM 000176 - 101, 102 | | | |
| | NR3C2 | MR | NM 000901 - 103, 104 | | | |
| | NR3C3 | PR | NM 000926 - 105, 106 | | | |
| | NR3C4 | AR | NM 000044 - 107, 108 | | | |
| Group IV | | | | | | |
| 4A | NR4A1 | Nurr77 | NM 002135 - 109, 110 | NM 173157 - | NM 173158 - | |
| | | | | 111, 112 | 113, 114 | |
| | NR4A2 | Nurr1 | NM 006186 - 115, 116 | NM 173171 - | NM 173172 - | NM 173173 - |
| | | | | 117, 118 | 119, 120 | 121, 122 |
| | NR4A3 | Nor1 | NM 006981 - 123, 124 | NM 173198 - | NM 173199 - | NM 173200 - |
| | | | | 125, 126 | 127, 128 | 129, 130 |
| Group V | | | | | | |
| 5A | NR5A1 | SF-1 | NM 004959 - 131, 132 | | | |
| | NR5A2 | LRH-1 | NM 003822 - 133, 134 | | | |
| Group VI | | | | | | |
| 6A | NR6A1 | GCNF | NM 033334 - 135, 136 | NM 001489 - | NM 033335 - | |
| | | | | 137, 138 | 139, 140 | |
| Group VII | | | | | | |
| 0B | NR0B1 | DAX1 | NM 000475 - 141, 142 | | | |
| | NR0B2 | SHP | NM 021969 - 143, 144 | | | |

[0125] The sequences of all the GenBank Accession Numbers in Table 1 are incorporated herein by reference. The sequences are designated with the accession number followed by the SEQ ID NO: for the nucleotide sequence followed by the protein sequence. For example NM199334—1, 2 means that the nucleotide sequence for NR1A1 (TR alpha) is SEQ ID NO:1 and the protein sequence is SEQ ID NO:2.

[0126] In embodiments employing known ligands, the ligands can be any ligand that binds to the nuclear hormone receptor and is known to one of skill in the art. Examples of known ligands include but are not limited to those in Table 3 that also identify the nuclear hormone receptor they are associated with.

[0127] In some embodiments, one or more ‘helper genes’ encoding helper proteins including but not limited to: coactivators, corepressors, kinases and/or signaling molecules, are expressed in the cells expressing the nuclear receptor. Alternatively, in some embodiments, polypeptides to be tested for activity as a coactivator, kinase or signaling molecule are expressed in the cells expressing the receptor. In embodiments employing the known ‘helper genes’ (encoding helper proteins such as coactivators, corepressors, kinases or signaling molecules), any such molecules can also be used that are known to one of skill in the art, including but not limited to those identified in Table 2. These coactivators, corepressors or kinases acting as helper proteins can be provided in the cells to be assayed. By providing these molecules one can identify ligands selective for a particular combination of the nuclear receptor and one or more helper genes proteins such as coactivators, corepressors, kinases or signaling molecules. Thus, signaling molecules can be expressed in the cell in addition to one or more receptors and the cells can be contacted with a ligand. Alternatively, the assay can be carried out without contacting the cells with a ligand in embodiments in which the receptor is constitutively active.

TABLE 2
List of modulators of nuclear hormone receptor activity

| Name | Alternate Names | GenBank # | Variant 1 | Variant 2 | Variant 3 | Variant 4 |
|---|---|---|---|---|---|---|
| Co-Activators | | | | | | |
| SRC family | | | | | | |
| SRC-1 | NCoA-1 | NM 003743 - | NM 147223 - | NM 147233 - | | |
| | | 145, 146 | 147, 148 | 149, 150 | | |
| SRC-2 | TIF2, GRIP1, NCoA2 | NM 006540 - | | | | |
| | | 151, 152 | | | | |
| SRC-3 | RAC3, AIB1, ACTR | NM 181659 - | NM 006534 - | | | |
| | | 153, 154 | 155, 156 | | | |
| TRAP/DRIP family | | | | | | |
| DRIP250 | KIAA 0593 | AB 011165 - | | | | |
| | | 157, 158 | | | | |
| DRIP240 | KIAA 0192 | D 83783 - | | | | |
| | | 159, 160 | | | | |
| DRIP205 | TRAP220 | AF 055994 - | | | | |
| | | 161, 162 | | | | |
| DRIP150 | RGR-1 | AF 304448 - | | | | |
| | | 163, 164 | | | | |
| DRIP130 | | AF 105332 - | | | | |
| | | 165, 166 | | | | |
| DRIP100 | TRAP100 | NM 014815 - | | | | |
| | | 167, 168 | | | | |
| DRIP92 | | AF 106934 | | | | |
| | | 169, 170 | | | | |
| DRIP80 | | AF 105421 - | | | | |
| | | 171, 172 | | | | |
| DRIP36 | HSPC126 | AF 161475 - | | | | |
| | | 173, 174 | | | | |
| Misc. | | | | | | |
| CBP | p300 | NM 001429 | | | | |
| | | 175, 176 | | | | |
| PCAF | CAF | NM 003884 - | | | | |
| | | 177, 178 | | | | |
| CARM1 | PRMT4 | NM 199141 - | | | | |
| | | 179, 180 | | | | |
| PGC-1 alpha | PPARGC1, PGC1 | NM 013261 - | | | | |
| | | 181, 182 | | | | |
| PGC-1 beta | PERC, PGC1B | NM 133263 - | | | | |
| | | 183, 184 | | | | |
| HDAC9 | HDAC, HDRP | NM 058176 - | NM 058177 - | NM 014707 - | NM 178423 - | NM 178425 - |
| | | 185, 186 | 187, 188 | 189, 190 | 191, 192 | 193, 194 |
| Co-Repressors | | | | | | |
| NCOR-1 | NCOR | NM 006311 - | AF 303586 - | AF303585 - | AF303584 - | |
| | | 195, 196 | 197, 198 | 199, 200 | 201, 202 | |
| NCOR-2 | SMRT | NM 006312 - | | | | |
| | | 203, 204 | | | | |
| Kinases | | | | | | |
| CDK2 | p33 | NM 001798 - | NM 052827 - | | | |
| | | 205, 206 | 207, 208 | | | |
| CDK7 | | NM 001799 - | | | | |
| | | 209, 210 | | | | |
| ERK1 | MAPK3 | NM 002746 - | | | | |
| | | 211, 212 | | | | |
| ERK2 | MAPK2 | NM 030662 - | | | | |
| | | 213, 214 | | | | |
| GSK-3 | | NM 002093 - | | | | |
| | | 215, 216 | | | | |
| JNK1 | MAPK8 | NM 139049 - | NM 002750 - | NM 139046 - | NM 139047 - | |
| | | 217, 218 | 219, 220 | 221, 222 | 223, 224 | |
| JNK2 | MAPK9 | NM 002752 - | NM 139068 - | NM 139069 - | NM 139070 - | |
| | | 225, 226 | 227, 228 | 229, 230 | 231, 232 | |
| Protein Kinase A | | NM 002730 - | NM 002731 - | NM 002732 - | NM 002733 - | NM 002734 - |
| | | 233, 234 | 235, 236 | 237, 238 | 239, 240 | 241, 242 |

[0128] The sequences of all the GenBank Accession Numbers in Table 2 are incorporated herein by reference.

Screening Assays

[0129] The screening assay used in the present method can include any functional assay that would reflect one or more nuclear receptor activities in, for instance, mammalian or non-mammalian cells, proteins, cytosolic and/or nuclear extracts, membrane extracts, each of which containing the appropriate nuclear receptor(s), and are capable of sensing the ability of compound(s) to activate or inactivate the receptor(s).

[0130] In preferred embodiments, Receptor Selection and Amplification Technology R-SAT (U.S. Pat. Nos. 5,707,798; 5,912,132; and 5,955,281, the disclosures of which are incorporated herein by reference in their entireties), is used as a screening assay.

[0131] Other assays involve the initial steps of transfecting an expressible nuclear hormone receptor gene, transfecting at least one “helper gene” and identifying a measurable output in the presence of at least one test substance. In one embodiment, a receptor is selected from Table 1 and at least one helper gene is selected from Table 2. Then at least one test substance can be added and a measurable output analyzed.

[0132] For hybridization purposes, DNA can be isolated from the cells and digested with a suitable restriction endonuclease. After digestion, the resulting DNA fragments can be subjected to electrophoresis on an agarose gel. DNA from the gel can then be blotted onto a nitrocellulose filter and hybridized with a radiolabeled oligonucleotide probe. The probe can conveniently contain a DNA fragment of the receptor gene (substantially according to the method of E. M. Southern, J. Mol. Biol. 98, 1975, pp. 503).

[0133] For amplification purposes, total mRNA isolated form the cells can be reverse transcribed to prepare a cDNA library. cDNA encoding the receptor can then be amplified by polymerase chain reaction (PCR) using oligonucleotide primers corresponding to segments of the gene coding for receptor in question and detected by size on an agarose gel. Amplified receptor cDNA can also be detected by hybridization to a radiolabelled oligonucleotide probe comprising a DNA sequence corresponding to at least part of the gene encoding the receptor. This method is described by, e.g., Sambrook et al., supra.

[0134] Mutant receptors can be used in any of the methods described herein. Such mutant receptors can be used for a variety of reasons, including by not limited to identify corepressors, coactivators, kinases, signaling molecules, agonists and/or antagonists that specifically interact with one form of the receptor such as a homodimeric form, a heterodimeric form, a hormone bound form, an alternatively spliced form, an activated form or a repressed form. Thus, any known site can be mutated in such a way that the other receptor, hormone, coactivator, and/or corepressor can no longer bind. Many such receptors have been identified and produced and are thus known in the art. Alternatively, the methods to produce such a mutant receptor by cloning the receptor, performing mutagenesis on the cloned receptor, and screening for constitutively activated receptors or ligand-independent receptor can be found generally in such references as Maniatis “Molecular Cloning, A Laboratory Manual” and Ausubel et al. “Short Protocols in Molecular Biology”, 1989 Greene Publishing Associates and Wiley-Interscience (See for example, pages 233-250 for mutagenesis methods). Alternatively, the method described herein can be used to screen and identify ligand-independent receptors by comparing the activity of the transfected receptor in the presence and absence of ligand. The presence of the ligand will not affect the activity of the receptor in the assay if the receptor is ligand-independent. In addition, ligand independent receptors can be used in the present methods to identify compounds that inhibit their activity, such as antagonists or inverse agonists.

### EXAMPLES

[0135] The invention described and claimed herein is not to be limited in scope by the specific embodiments herein disclosed, since these embodiments are intended as illustration of several aspects of the invention. Any equivalent embodiments are intended within the scope of this invention. Indeed, various modifications of the invention in addition to these shown and described herein will become apparent to those skilled in the art from the foregoing description. Such modifications are also intended to fall within the scope of the appended claims.

[0136] The present invention is further disclosed in the following Examples, that are not in any way intended to limit the scope of the invention as claimed.

### Example 1

### A General Protocol for Assaying a Single Nuclear Receptor

[0137] The functional cell-based assay Receptor and Selection Amplification Technology (R-SAT™) (U.S. Pat. No. 5,707,798) was modified to develop an assay that allows the investigation of the pharmacological phenotype of one nuclear receptor.

[0138] Cultures of NIH-3T3 cells (available from the American Type Culture Collection, as ATCC CRL 1658) were prepared to 50-60% confluency. On day one, cells were trypsinized, centrifuged and plated at 8,000 cells/well in a 96-well plate in 100 μl/well of Dubelcco's Modified Eagle's Medium (DMEM), 10% calf serum. On day two, cells were transfected using the transfection reagent Superfect® (Qiagen, Inc.) as recommended by the manufacturer. Various doses of the nuclear receptor plasmid DNA were transfected. DNA mixtures included 0.1 to 10 ng/well of receptors DNA, 20 to 30 ng/well of β-galactosidase plasmid DNA (pSV β-galactosidase, Promega) and 15 μl of Superfect®. On day three, the media was replaced by DMEM with 2% Cyto-SF3 (Kemp Biotechnologies, Inc.) containing variable amounts of the compounds being tested. Cells were grown at 37° C. in a humidified environment supplemented with 5% CO₂ for five days prior to assessing β-galactosidase activity by replacing the media with the β-galactosidase substrate o-nitrophenyl-β-D-galacto-pyrannoside as described in U.S. Pat. No. 5,707,798. All data were obtained by measuring the change in absorbance at 420 nm using an automated plate reader. EC50 values were calculated using the equation r=A+B(x/(c+c)), where A=minimum response, B=maximum response minus maximum response, c=EC50, r=response, and x=concentration of ligand. Curves were generated using XLFit software (Microsoft).

[0139] In the experiments illustrated in Table 3, several nuclear receptors with known ligands were tested using the single receptor format method described above. The data in Table 3 demonstrate that the present methods are useful in obtaining pharmacologically relevant responses to all nuclear hormone receptors.

### Example 2

### Multiple Receptor Format

[0140] To test the amenability of the methods described in Example 1 to a multiple receptor format, NIH-3T3 cells were co-transfected with plasmids encoding the glucocorticoid receptor (GR), the Estrogen Receptor beta (ERB), and β-galactosidase cDNA as described in Example 1. The transfected cells were contacted with known ligands for each receptor and activity was measured as described in Example 1. Positive β-galactosidase responses were indicative of effective ligand/receptor interactions. As shown, selective pharmacological responses to the two ligands were seen, confirming that the methods disclosed herein can be used in a multiple receptor format.

### Example 3

### Importance of Co-Activators in the Nuclear Response

[0141] The following example demonstrates the importance of co-activators in the pharmacological response of the rifampicin (PXR) receptor (GenBank AF61056). The PXR receptor heterodimerizes with the retinoic acid nuclear receptor RXR subtype (GenBank U38480). The coactivators GRIP1 (Glucocorticoid Receptor Interacting Protein 1) (GenBank U39060) and SRC-1 (Steroid Receptor Coactivator 1) (GenBank U90661) were used in this assay. In summary, plasmid DNA encoding the coactivator(s) were transfected along with the aforementioned transfection mixture (containing the PXR, RXR, and β-Gal plasmid DNAs). The co-transfected cells were contacted with Rifampicin, and β-Galactosidase activity was measured as described in Example 1.

[0142] The results are presented in FIG. 2, which represents a typical pharmacological profile of an agonist response of the PXR receptor as determined by R-SAT. The conclusions that can be drawn from this study are:
[0143] (a) co-transfection of one co-activator (either SRC-1 or GRIP1) results in the partial activation of the pharmacological PXR response, but significantly stronger than the marginal response observed with PXR and RXR alone,
[0144] (b) co-transfection of both co-activators (SRC-1 and GRIP1) results in a synergistic effect that leads to the complete PXR pharmacological response,
[0145] (c) co-transfection of multiple co-activators improve the PXR agonist response without displaying any detrimental effects.

[0146] The experiments above indicate that co-activators are highly useful in triggering the cellular amplification of cells transfected with the nuclear receptors PXR and RXR, particularly to enough of an extent that they can be easily assayed. Indeed, PXR and RXR expressed alone defined a weak (5-10% efficacy) non-potent pharmacological response. In the presence of co-activators, the PXR/RXR pharmacological response was strong (100% efficacy) and pharmacologically relevant. Moreover, these studies reflect the fact that the amplification assay is highly useful for identifying the signaling requirements (such as co-activators, for example) of nuclear receptors.

### Example 4

### Stimulation of a Number of Nuclear Receptors

[0147] Table 3 lists several nuclear receptors belonging to several functional categories based on their ligand-binding properties. Cells transfected with these nuclear reporters were successfully assayed using the general protocol for assaying a single nuclear receptor method described in Example 1, using the indicated ligands. The results are shown in Table 3. These data indicate that all nuclear receptors can be assayed using the methods described herein or any variations of the assay that would be apparent to one of skill in the art.

TABLE 3
Nuclear hormone receptors assayed using R-SAT ™

| Nuclear | Trivial | | EC50 |
|---|---|---|---|
| Receptor | Name | Ligand | nM |
| NR1A2 | TRβ | T3 hormone | 1-2 |
| NR1B1 | RARα | AM-580 | 40-100 |
| NR1B2 | RARβ | AM-580 | 30-100 |
| NR1B2 | RARβ2 | AM-580 | 10-50 |
| NR1B3 | RARγ | AM-580 | 10-50 |
| NR1C2 | PPARδ | carbaprostacyclin | 200-500 |
| NR1H2 | LXRβ | 22(R)OH-Cholesterol | 3,000-5,000 |
| NR1H3 | LXRα | 22(R)OH-Cholesterol | 3,000-5,000 |
| NR1H4 | FXR | CDCA | 1,000-3,000 |
| NR1I1 | VDR | vitamin D3 | 0.05-0.2 |
| NR1I2 | PXR | rifampicin | 500-1,000 |
| NR2B1 | RXRα | retinoic acid | 20-70 |
| NR2B2 | RXRβ | retinoic acid | 20-70 |
| NR2B3 | RXRγ | retinoic acid | 30-100 |
| NR3A1 | Erα | 17 beta estradiol | 0.005-0.030 |
| NR3A2 | Erβ | 17 beta estradiol | 0.005-0.030 |
| NR3C1 | GRα | dexamethasone | 0.1-0.5 |
| NR3C4 | AR | DHT | 0.2-0.5 |

### Example 5

### Detection of Constitutive Activity of Nuclear Receptors

[0148] Constitutive activity is defined by the activity that a receptor displays in the absence of binding to an agonist. The following example demonstrates that the amplification assay and methods described herein are useful for determining the constitutive activity of various nuclear receptors. As demonstrated in Example 6, such information is particularly useful in determining experimental parameters to assess, for example, inverse agonist activity of known or unknown compounds on the receptors.

[0149] Cells were transfected with plasmid DNAs encoding the RXR retinoic acid receptor and β-Gal reporter, as well as a range of concentrations of plasmid DNA encoding the PPARγ or CARα nuclear receptors as well as as described in Example 1. PPARγ is the peroxisome proliferator activated receptor. CARα is the constitutive androstane receptor (CAR) alpha. Both receptors form heterodimers with the RXR receptor. Transfections were carried out with 300 pg, 1.5 ng, 6.0 ng, or 30 ng of PPARγ or CARα DNA. The β-Galactosidase activity of the transfected cells was measured and compared to cells that did not express a recombinant nuclear receptor, as described in Example 1. FIG. 3 shows the results of the experiments, as expressed in Miller Units.

[0150] The conclusions that can be drawn from this study are:
[0151] 1—The R-SAT™ technology is amenable to measuring levels of constitutive activity displayed by nuclear receptors,
[0152] 2—Each nuclear receptor expresses different degrees of constitutive activity that are dependent in part upon the quantity of receptor transfected into the cells,
[0153] 3—The extent of the constitutive activity displayed by a nuclear receptor constitutes a dynamic range that allows for the response to an inverse agonist.

### Example 6

### Detection of Inverse Agonism of Nuclear Receptors

[0154] The following example demonstrates that the methods described herein are useful in identifying and detecting inverse agonists of nuclear receptors.

[0155] As demonstrated in Example 5, PPARγ and CARα exhibit constitutive activity. Cells were transfected with plasmid DNAs encoding the PPARγ and RXR receptors (known to form heterodimers) or plasmid DNAs encoding CARα and RXR nuclear receptors (known to form heterodimers), as well as the β-Gal reporter DNA as described in Example 1. The cells were contacted with the indicated amounts of known inverse agonists BRL 49653 or Androstenol, respectively, as described in Example 1, and β-Galactosidase activity was measured. The data are presented in FIGS. 4A and 4B, which shows that both compounds had inverse agonist activity. These data demonstrate that the R-SAT™ technology is amenable to detect compounds with inverse agonist activity at nuclear receptor(s).

### Example 7

### Enablement of Receptor Activity Through Different Helper Strategies

[0156] The following example illustrates that different helper strategies are needed to enable or improve the activity of nuclear hormone receptors.

[0157] Cells were transfected with nuclear receptors with known ligands (Table 4A) or orphan nuclear receptors (Table 4B) and the indicated helper genes (SRC1, GRIP, or Erk2). SRC1 and GRIP are two different types of co-activators, and Erk2 is a kinase. Transfected cells were assayed using R-SAT™ as described in Example 1. Cell samples exhibiting activity of under 500 absorbance units (AU) were designated “−.” Samples exhibiting activity between 100 and 500 units were assigned “+,” samples exhibiting activity between 500 and 1,000 AU were assigned “++,” and samples exhibiting over 1,000 AU of activity were assigned “+++.” The data are reported in Tables 4A and 4B.

[0158] Table 4: Nuclear hormone receptors and helper genes strategies are assayed using R-SAT™

TABLE 4A

| | | SRC1/ | | ERK2/ |
|---|---|---|---|---|
| | | SEQ ID NOs: | DRIP205/SEQ | SEQ ID |
| Receptor/SEQ ID NO:* | | 145 and 147* | ID NO: 161* | NO: 213* |
| TR beta | 5 | − | ++ | ++ |
| RAR beta | 9 | ++ | ++ | ++ |
| PPARγ | 21 23, 25, 27 | +++ | + | +++ |
| FXR | 49 | +++ | +++ | +++ |
| LXR beta | 45 | +++ | − | ++ |
| VDR | 51 | ++ | + | + |
| PXR | 53, 55, 57 | ++ | − | + |
| RXR alpha | 69 | + | ++ | ++ |
| ER beta | 93 | +++ | ++ | +++ |
| AR | 107 | + | ++ | − |
| MR | 103 | +++ | ++ | + |
| GR | 101 | ++ | − | + |

[0159] TABLE 4B

| | | | | ERK2/ |
|---|---|---|---|---|
| Receptor/ | | SRC1/SEQ ID NOs: | DRIP205/SEQ | SEQ ID |
| SEQ ID NO:* | | 145, 147* | ID NO: 161* | NO: 213* |
| SHP | 143 | + | − | + |
| revErb alpha | 29 | − | − | + |
| ROR gamma | 43 | − | +++ | + |
| HNF4 alpha | 61 | +++ | ++ | +++ |
| TR2 alpha | 75 | + | − | − |
| TLX | 79 | − | − | + |
| COUP-TF beta | 87 | + | + | − |
| EAR2 | 89 | ++ | +++ | + |
| ERR gamma | 99 | − | − | ++ |
| NOR-1 | 123 | +++ | ++ | +++ |
| GCNF | 135 | + | − | + |

*The SEQ ID NOs: given are for nucleic acid receptors, helper genes and variants. The amino acid sequences are the next consecutive even number.

[0160] These data demonstrate that helper genes are often necessary to enable or improve the assays for nuclear hormone receptors.

### Example 8

### Selective Nuclear Receptor Modulators

[0161] This example shows how the disclosed methods can be used to screen for candidate molecules with activity against a particular receptor. Selective nuclear receptor modulators refer to a class of compounds with mixed agonist/antagonist characteristics. This specificity is cell-type dependent and has been associated with co-regulator recruitment in the case of estrogen modulators (Shang and Brown, 2002, Nature, 295:2465). More generally the design of selective nuclear receptor modulators is thought to provide the potential to identify novel drugs with a better therapeutic profile than those available currently. The amplification technology described herein and, for example, R-SAT™ allows for the distinction of a number of nuclear receptor-coregulator interactions (see Table 4). As such R-SAT™ is amenable to the identification of selective modulators of nuclear receptor activities.

### Example 9

### Importance of Kinases in the Nuclear Response

[0162] The following example demonstrates the importance of helper genes such as kinases in the pharmacological responses of nuclear receptors.

[0163] Cells were transfected with plasmid DNA encoding the nuclear receptor RARβ2 and β-Gal plasmid DNAs, as well as the MAP kinase ERK2. The transfected cells were contacted with the indicated amount of AM 590, a pan-retinoid agonist ligand. Cells were assayed using R-SAT™ as described in Example 1. The results are presented in FIG. 5, which represents a typical pharmacological profile of an agonist response of the retinoid receptor as determined by R-SAT. These data demonstrate that co-transfection of ERK2 improves the agonist response seen for RARβ2.

### Example 10

### Identification of Novel Interactions

[0164] This example demonstrates how the disclosed methods can be used to identify and dissect novel interactions between a particular receptor and signaling molecules.

[0165] To determine whether β-arrestin 1 or β-arrestin 2, which are known to interact with a number of signaling molecules that link to MAPK signaling cascades, the ability of β-arrestin 1 or β-arrestin 2 to affect the activity of different retinoid nuclear receptors was assayed. Cells were co-transfected with the indicated RAR receptor, and either β-arrestin 1 or β-arrestin 2, as indicated, as well as the β-Gal plasmid DNA, as described in Example 1. The cells were contacted with AM 590, and assayed using R-SAT™ as described in Example 1. The data are presented in FIG. 6. As shown, the signaling intermediate β-arrestin 2 (GenBank NM004313, NM199004 m, the disclosures of which are herein incorporated by reference in their entirety) but not β-arrestin 1 (GenBank NM004041, NM020251, the disclosures of which are herein incorporated by reference in their entirety) can positively modulate the activity of the RAR receptors, such as RARβ2.

[0166] Co-immunoprecipitation experiments were used to confirm the interaction of β-arrestin 2 with RARβ2 and Erk. Cells co-transfected with plasmids encoding RARβ2 and Erk as described in Example 7 were scraped off of plates, spun down, and resuspended in lysis buffer (25 mM HEPES, 0.3M NaCl, 1.5 mM MgCl2, 0.2 mM EDTA and 0.5% Triton and a protease inhibitor cocktail. 50 μg of cell extracts were pre-cleared with pre-immune serum, incubated with protein A/G sepharose and an anti-Erk, Jnk, or P38 antibody (as indicated) for 2 hours, then washed extensively. Immune complexes were separated on denaturing polyacrylamide gels using SDS-PAGE and the proteins were blotted onto Immobilon-P membranes (Millipore, Billercia, Mass.). Western blotting was performed as described in Piu et al. (2002), using an anti-RARβ2 antibody. The data in FIG. 7A demonstrate the interaction between RARβ2 and Erk. In contrast, no interaction was seen with RARβ2 and Jnk or p38.

[0167] In the set of experiments depicted in FIG. 7B, cells were co-transfected with Erk2, RARβ2, and β arrestin 2. Co-immunoprecipitation was performed as described above, using an anti-Erk2 or anti-RARβ2 antibody, as indicated. Anti-β arrestin 2 antibody was used in the Western blots. As shown in FIG. 7B β-arrestin 2 physically interacts with the MAP kinase ERK2, which as shown in FIG. 7A binds to and activates RARβ2.

[0168] The data from this Example validate the use of the methods described herein to identify and characterize novel interactions between nuclear receptors and other signaling proteins.

[0169] The various methods and techniques described above provide a number of ways to carry out the invention. Of course, it is to be understood that not necessarily all objectives or advantages described can be achieved in accordance with any particular embodiment described herein. Thus, for example, those skilled in the art will recognize that the methods can be performed in a manner that achieves or optimizes one advantage or group of advantages as taught herein without necessarily achieving other objectives or advantages as can be taught or suggested herein.

[0170] Furthermore, the skilled artisan will recognize the interchangeability of various features from different embodiments. Similarly, the various features and steps discussed above, as well as other known equivalents for each such feature or step, can be mixed and matched by one of ordinary skill in this art to perform methods in accordance with principles described herein.

[0171] Although the invention has been disclosed in the context of certain embodiments and examples, it will be understood by those skilled in the art that the invention extends beyond the specifically disclosed embodiments to other alternative embodiments and/or uses and obvious modifications and equivalents thereof. Accordingly, the invention is not intended to be limited by the specific disclosures of preferred embodiments herein, but instead by reference to claims attached hereto.

The application's sequence listing, which the Patent Office published only in electronic form, follows.

SEQUENCE LISTING (242 sequences)

SEQ ID NO: 1 - DNA, 2308 bp, Homo sapiens
  CDS (484)...(1716): TR alpha (NR1A1) variant 1
cgcctctgccggaggagccgcggggccgccacactcgccccccgccccccccgcgctcactcgcactcacacccgggcgcaggaggcgggcggcccgggccccaccggccccccatggacgcccccagcacggggcgctgagacccccgcgtcgctgcccagcccggtccggcgcgccacgccgagggatctctggacaggacaagactccgaagctactcccccagcacacagcccgggacccacaaacccagcttgcccccagccctcccacctgccactccctggcccctcccaccgcccgccccccttggggcgcagggcatggtgtgaaaggccaagtgctgaggcgggtatcatgggtgctgtgccctagggcctgggtggcagggggtgggtggcctgtgggtgtgccgggggggccagtgtgcccaccccagtctcttggcgtgctggagggcatcctggatggaattgaagtgaatggaacagaagccaagcaaggtggagtgtgggtcagacccagaggagaacagtgccaggtcaccagatggaaagcgaaaaagaaagaacggccaatgttccctgaaaaccagcatgtcagggtatatccctagttacctggacaaagacgagcagtgtgtcgtgtgtggggacaaggcaactggttatcactaccgctgtatcacttgtgagggctgcaagggcttctttcgccgcacaatccagaagaacctccatcccacctattcctgcaaatatgacagctgctgtgtcattgacaagatcacccgcaatcagtgccagctgtgccgcttcaagaagtgcatcgccgtgggcatggccatggacttggttctagatgactcgaagcgggtggccaagcgtaagctgattgagcagaaccgggagcggcggcggaaggaggagatgatccgatcactgcagcagcgaccagagcccactcctgaagagtgggatctgatccacattgccacagaggcccatcgcagcaccaatgcccagggcagccattggaaacagaggcggaaattcctgcccgatgacattggccagtcacccattgtctccatgccggacggagacaaggtggacctggaagccttcagcgagtttaccaagatcatcaccccggccatcacccgtgtggtggactttgccaaaaaactgcccatgttctccgagctgccttgcgaagaccagatcatcctcctgaaggggtgctgcatggagatcatgtccctgcgggcggctgtccgctacgaccctgagagcgacaccctgacgctgagtggggagatggctgtcaagcgggagcagctcaagaatggcggcctgggcgtagtctccgacgccatctttgaactgggcaagtcactctctgcctttaacctggatgacacggaagtggctctgctgcaggctgtgctgctaatgtcaacagaccgctcgggcctgctgtgtgtggacaagatcgagaagagtcaggaggcgtacctgctggcgttcgagcactacgtcaaccaccgcaaacacaacattccgcacttctggcccaagctgctgatgaaggtgactgacctccgcatgatcggggcctgccacgccagccgcttcctccacatgaaagtcgagtgccccaccgaactcttccccccactcttcctcgaggtctttgaggatcaggaagtctaaagcctcaggcggccagagggtgtgcggagctggtggggaggagcctggagagaaggggcagagctgggggctgagggagacccccccacaccccttctctccttcctctcgtccttggatagattcagctcccacacacacacccgcactgcccaggtccctcctcagacctccagccctgggacagggcaaacaactgaacttgctatggaaaggacagtgtgggaggctgggggagctgtgtcctgcagttcccaggaccccatcctctcagaaggtaggggaagggcgggaggattgagaagggacaagccaccttgaccgtaggggaaggaggaatgtgggctgggggaagatgccctcaactcaccccctacacacacatgagagagagcccccacccagttccttggcctaggtctcccctccaggctgagggcctctctacttccccagatgcctgggtgcaaagaacggcttggcttggctcctcctctggaggttaaaatttatagtcattctaactgcactttggaaaccaagcaaggggagaagacaaatgaagaaaaactagacagagaaaaaaaaaaaa

SEQ ID NO: 2 - protein, 410 aa, Homo sapiens
MEQKPSKVECGSDPEENSARSPDGKRKRKNGQCSLKTSMSGYIPSYLDKDEQCVVCGDKATGYHYRCITCEGCKGFFRRTIQKNLHPTYSCKYDSCCVIDKITRNQCQLCRFKKCIAVGMAMDLVLDDSKRVAKRKLIEQNRERRRKEEMIRSLQQRPEPTPEEWDLIHIATEAHRSTNAQGSHWKQRRKFLPDDIGQSPIVSMPDGDKVDLEAFSEFTKIITPAITRVVDFAKKLPMFSELPCEDQIILLKGCCMEIMSLRAAVRYDPESDTLTLSGEMAVKREQLKNGGLGVVSDAIFELGKSLSAFNLDDTEVALLQAVLLMSTDRSGLLCVDKIEKSQEAYLLAFEHYVNHRKHNIPHFWPKLLMKVTDLRMIGACHASRFLHMKVECPTELFPPLFLEVFEDQEV

SEQ ID NO: 3 - DNA, 2474 bp, Homo sapiens
  CDS (484)...(1956): TR alpha (NR1A1) variant 2
cgcctctgccggaggagccgcggggccgccacactcgccccccgccccccccgcgctcactcgcactcacacccgggcgcaggaggcgggcggcccgggccccaccggccccccatggacgcccccagcacggggcgctgagacccccgcgtcgctgcccagcccggtccggcgcgccacgccgagggatctctggacaggacaagactccgaagctactcccccagcacacagcccgggacccacaaacccagcttgcccccagccctcccacctgccactccctggcccctcccaccgcccgccccccttggggcgcagggcatggtgtgaaaggccaagtgctgaggcgggtatcatgggtgctgtgccctagggcctgggtggcagggggtgggtggcctgtgggtgtgccgggggggccagtgtgcccaccccagtctcttggcgtgctggagggcatcctggatggaattgaagtgaatggaacagaagccaagcaaggtggagtgtgggtcagacccagaggagaacagtgccaggtcaccagatggaaagcgaaaaagaaagaacggccaatgttccctgaaaaccagcatgtcagggtatatccctagttacctggacaaagacgagcagtgtgtcgtgtgtggggacaaggcaactggttatcactaccgctgtatcacttgtgagggctgcaagggcttctttcgccgcacaatccagaagaacctccatcccacctattcctgcaaatatgacagctgctgtgtcattgacaagatcacccgcaatcagtgccagctgtgccgcttcaagaagtgcatcgccgtgggcatggccatggacttggttctagatgactcgaagcgggtggccaagcgtaagctgattgagcagaaccgggagcggcggcggaaggaggagatgatccgatcactgcagcagcgaccagagcccactcctgaagagtgggatctgatccacattgccacagaggcccatcgcagcaccaatgcccagggcagccattggaaacagaggcggaaattcctgcccgatgacattggccagtcacccattgtctccatgccggacggagacaaggtggacctggaagccttcagcgagtttaccaagatcatcaccccggccatcacccgtgtggtggactttgccaaaaaactgcccatgttctccgagctgccttgcgaagaccagatcatcctcctgaaggggtgctgcatggagatcatgtccctgcgggcggctgtccgctacgaccctgagagcgacaccctgacgctgagtggggagatggctgtcaagcgggagcagctcaagaatggcggcctgggcgtagtctccgacgccatctttgaactgggcaagtcactctctgcctttaacctggatgacacggaagtggctctgctgcaggctgtgctgctaatgtcaacagaccgctcgggcctgctgtgtgtggacaagatcgagaagagtcaggaggcgtacctgctggcgttcgagcactacgtcaaccaccgcaaacacaacattccgcacttctggcccaagctgctgatgaaggagagagaagtgcagagttcgattctgtacaagggggcagcggcagaaggccggccgggcgggtcactgggcgtccacccggaaggacagcagcttctcggaatgcatgttgttcagggtccgcaggtccggcagcttgagcagcagcttggtgaagcgggaagtctccaagggccggttcttcagcaccagagcccgaagagcccgcagcagcgtctcctggagctgctccaccgaagcggaattctccatgcccgagcggtctgtggggaagacgacagcagtgaggcggactccccgagctcctctgaggaggaaccggaggtctgcgaggacctggcaggcaatgcagcctctccctgaagccccccagaaggccgatggggaaggagaaggagtgccataccttctcccaggcctctgccccaagagcaggaggtgcctgaaagctgggagcgtgggctcagcagggctggtcacctcccatcccgtaagaccaccttcccttcctcagcaggccaaacatggccagactcccttgctttttgctgtgtagttccctctgcctgggatgcccttccccctttctctgcctggcaacatcttacttgtcctttgaggccccaactcaagtgtcacctccttccccagctcccccaggcagaaatagttgtctgtgcttccttggttcatgcttctactgtgacacttatctcactgttttataattagtcgggcatgagtctgtttcccaagctagactgtgtctgaatcatgtctgtatccccagtgcccggtgcagggcctggcatagagtaggtactccataaaaggtgtgttgaattgaaaaaaaaaaaaaaaaaaaaaaaaaaaaaaaaaaa

SEQ ID NO: 4 - protein, 490 aa, Homo sapiens
MEQKPSKVECGSDPEENSARSPDGKRKRKNGQCSLKTSMSGYIPSYLDKDEQCVVCGDKATGYHYRCITCEGCKGFFRRTIQKNLHPTYSCKYDSCCVIDKITRNQCQLCRFKKCIAVGMAMDLVLDDSKRVAKRKLIEQNRERRRKEEMIRSLQQRPEPTPEEWDLIHIATEAHRSTNAQGSHWKQRRKFLPDDIGQSPIVSMPDGDKVDLEAFSEFTKIITPAITRVVDFAKKLPMFSELPCEDQIILLKGCCMEIMSLRAAVRYDPESDTLTLSGEMAVKREQLKNGGLGVVSDAIFELGKSLSAFNLDDTEVALLQAVLLMSTDRSGLLCVDKIEKSQEAYLLAFEHYVNHRKHNIPHFWPKLLMKEREVQSSILYKGAAAEGRPGGSLGVHPEGQQLLGMHVVQGPQVRQLEQQLGEAGSLQGPVLQHQSPKSPQQRLLELLHRSGILHARAVCGEDDSSEADSPSSSEEEPEVCEDLAGNAASP

SEQ ID NO: 5 - DNA, 1814 bp, Homo sapiens
  CDS (286)...(1671): TR beta (NR1A2)
cggcggggattaactttgcatgaataatgtgagtgcgcttggaaaagagacctcctgctccgcgggctcggggcaagagcccgcaggctaccttccccgggcaggggcgctcaacccaaccggctccagggcactggtaatttggctagaggaccgcgcggaggcagcgggatctgcgatttccttctggttggctgtcctgcgtgggtgccaagttccacacatgatttaatgaataagaaggagatgtcagtgaaaaaagggatccagaatgattactaacctatgactcccaacagtatgacagaaaatggccttacagcctgggacaaaccgaagcactgtccagaccgagaacacgactggaagctagtaggaatgtctgaagcctgcctacataggaagagccattcagagaggcgcagcacgttgaaaaatgaacagtcgtcgccacatctcatccagaccacttggactagctcaatattccatctggaccatgatgatgtgaacgaccagagtgtctcaagtgcccagaccttccaaacggaggagaagaaatgtaaagggtacatccccagttacttagacaaggacgagctctgtgtagtgtgtggtgacaaagccaccgggtatcactaccgctgtatcacgtgtgaaggctgcaagggtttctttagaagaaccattcagaaaaatctccatccatcctattcctgtaaatatgaaggaaaatgtgtcatagacaaagtcacgcgaaatcagtgccaggaatgtcgctttaagaaatgcatctatgttggcatggcaacagatttggtgctggatgacagcaagaggctggccaagaggaagctgatagaggagaaccgggagaaaagacggcgggaagagctgcagaagtccatcgggcacaagccagagcccacagacgaggaatgggagctcatcaaaactgtcaccgaagcccatgtggcgaccaacgcccaaggcagccactggaagcaaaaacggaaattcctgccagaagacattggacaagcaccaatagtcaatgccccagaaggtggaaaggttgacttggaagccttcagccattttacaaaaatcatcacaccagcaattaccagagtggtggattttgccaaaaagttgcctatgttttgtgagctgccatgtgaagaccagatcatcctcctcaaaggctgctgcatggagatcatgtcccttcgcgctgctgtgcgctatgacccagaaagtgagactttaaccttgaatggggaaatggcagtgacacggggccagctgaaaaatgggggtcttggggtggtgtcagacgccatctttgacctgggcatgtctctgtcttctttcaacctggatgacactgaagtagccctccttcaggccgtcctgctgatgtcttcagatcgcccggggcttgcctgtgttgagagaatagaaaagtaccaagatagtttcctgctggcctttgaacactatatcaattaccgaaaacaccacgtgacacacttttggccaaaactcctgatgaaggtgacagatctgcggatgataggagcctgccatgccagccgcttcctgcacatgaaggtggaatgccccacagaactcttcccccctttgttcttggaagtgttcgaggattagactgactggattcattctcataattcctacagcactactgggtgtcatttcattccattgcctagctcttttttgtttgtttctttgtgttgggagggattatttgggagggaaaagggaagtagtccttggcatagacatgg

SEQ ID NO: 6 - protein, 461 aa, Homo sapiens
MTPNSMTENGLTAWDKPKHCPDREHDWKLVGMSEACLHRKSHSERRSTLKNEQSSPHLIQTTWTSSIFHLDHDDVNDQSVSSAQTFQTEEKKCKGYIPSYLDKDELCVVCGDKATGYHYRCITCEGCKGFFRRTIQKNLHPSYSCKYEGKCVIDKVTRNQCQECRFKKCIYVGMATDLVLDDSKRLAKRKLIEENREKRRREELQKSIGHKPEPTDEEWELIKTVTEAHVATNAQGSHWKQKRKFLPEDIGQAPIVNAPEGGKVDLEAFSHFTKIITPAITRVVDFAKKLPMFCELPCEDQIILLKGCCMEIMSLRAAVRYDPESETLTLNGEMAVTRGQLKNGGLGVVSDAIFDLGMSLSSFNLDDTEVALLQAVLLMSSDRPGLACVERIEKYQDSFLLAFEHYINYRKHHVTHFWPKLLMKVTDLRMIGACHASRFLHMKVECPTELFPPLFLEVFED

SEQ ID NO: 7 - DNA, 2907 bp, Homo sapiens
  CDS (103)...(1491): RAR alpha (NR1B1)
gccatctgggcccaggccccatgccccgaggaggggtggtctgaagcccaccagagccccctgccagactgtctgcctcccttctgactgtggccgcttggcatggccagcaacagcagctcctgcccgacacctgggggcgggcacctcaatgggtacccggtgcctccctacgccttcttcttcccccctatgctgggtggactctccccgccaggcgctctgaccactctccagcaccagcttccagttagtggatatagcacaccatccccagccaccattgagacccagagcagcagttctgaagagatagtgcccagccctccctcgccaccccctctaccccgcatctacaagccttgctttgtctgtcaggacaagtcctcaggctaccactatggggtcagcgcctgtgagggctgcaagggcttcttccgccgcagcatccagaagaacatggtgtacacgtgtcaccgggacaagaactgcatcatcaacaaggtgacccggaaccgctgccagtactgccgactgcagaagtgctttgaagtgggcatgtccaaggagtctgtgagaaacgaccgaaacaagaagaagaaggaggtgcccaagcccgagtgctctgagagctacacgctgacgccggaggtgggggagctcattgagaaggtgcgcaaagcgcaccaggaaaccttccctgccctctgccagctgggcaaatacactacgaacaacagctcagaacaacgtgtctctctggacattgacctctgggacaagttcagtgaactctccaccaagtgcatcattaagactgtggagttcgccaagcagctgcccggcttcaccaccctcaccatcgccgaccagatcaccctcctcaaggctgcctgcctggacatcctgatcctgcggatctgcacgcggtacacgcccgagcaggacaccatgaccttctcggacgggctgaccctgaaccggacccagatgcacaacgctggcttcggccccctcaccgacctggtctttgccttcgccaaccagctgctgcccctggagatggatgatgcggagacggggctgctcagcgccatctgcctcatctgcggagaccgccaggacctggagcagccggaccgggtggacatgctgcaggagccgctgctggaggcgctaaaggtctacgtgcggaagcggaggcccagccgcccccacatgttccccaagatgctaatgaagattactgacctgcgaagcatcagcgccaagggggctgagcgggtgatcacgctgaagatggagatcccgggctccatgccgcctctcatccaggaaatgttggagaactcagagggcctggacactctgagcggacagccggggggtggggggcgggacgggggtggcctggcccccccgccaggcagctgtagccccagcctcagccccagctccaacagaagcagcccggccacccactccccgtgaccgcccacgccacatggacacagccctcgccctccgccccggcttttctctgcctttctaccgaccatgtgaccccgcaccagccctgcccccacctgccctcccgggcagtactggggaccttccctgggggacggggagggaggaggcagcgactccttggacagaggcctgggccctcagtggactgcctgctcccacagcctgggctgacgtcagaggccgaggccaggaactgagtgaggcccctggtcctgggtctcaggatgggtcctgggggcctcgtgttcatcaagacacccctctgcccagctcaccacatcttcatcaccagcaaacgccaggacttggctcccccatcctcagaactcacaagccattgctccccagctggggaacctcaacctcccccctgcctcggttggtgacagagggggtgggacaggggcggggggttccccctgtacataccctgccataccaaccccaggtattaattctcgctggttttgtttttattttaatttttttgttttgatttttttaataagaattttcattttaagcacatttatactgaaggaatttgtgctgtgtattggggggagctggatccagagctggagggggtgggtccgggggagggagtggctcggaaggggcccccactctcctttcatgtccctgtgccccccagttctcctcctcagccttttcctcctcagttttctctttaaaactgtgaagtactaactttccaaggcctgccttcccctccctcccactggagaagccgccagcccctttctccctctgcctgaccactgggtgtggacggtgtggggcagccctgaaaggacaggctcctggccttggcacttgcctgcacccaccatgaggcatggagcagggcagagcaagggccccgggacagagttttcccagacctggctcctcggcagagctgcctcccgtcagggcccacatcatctaggctccccagcccccactgtgaaggggctggccaggggcccgagctgcccccacccccggcctcagccaccagcacccccatagggcccccagacaccacacacatgcgcgtgcgcacacacacaaacacacacacactggacagtagatgggccgacacacacttggcccgagttcctccatttccctggcctgccccccacccccaacctgtcccacccccgtgccccctccttaccccgcaggacgggcctacaggggggtctcccctcacccctgcacccccagctgggggagctggctctgccccgacctccttcaccaggggttggggccccttcccctggagcccgtgggtgcacctgttactgttgggctttccactgagatctactggataaagaataaagttctatttattct

SEQ ID NO: 8 - protein, 462 aa, Homo sapiens
MASNSSSCPTPGGGHLNGYPVPPYAFFFPPMLGGLSPPGALTTLQHQLPVSGYSTPSPATIETQSSSSEEIVPSPPSPPPLPRIYKPCFVCQDKSSGYHYGVSACEGCKGFFRRSIQKNMVYTCHRDKNCIINKVTRNRCQYCRLQKCFEVGMSKESVRNDRNKKKKEVPKPECSESYTLTPEVGELIEKVRKAHQETFPALCQLGKYTTNNSSEQRVSLDIDLWDKFSELSTKCIIKTVEFAKQLPGFTTLTIADQITLLKAACLDILILRICTRYTPEQDTMTFSDGLTLNRTQMHNAGFGPLTDLVFAFANQLLPLEMDDAETGLLSAICLICGDRQDLEQPDRVDMLQEPLLEALKVYVRKRRPSRPHMFPKMLMKITDLRSISAKGAERVITLKMEIPGSMPPLIQEMLENSEGLDTLSGQPGGGGRDGGGLAPPPGSCSPSLSPSSNRSSPATHSP

SEQ ID NO: 9 - DNA, 3119 bp, Homo sapiens
  CDS (469)...(1815): RAR beta (NR1B2) variant 1
gtgacagaagtagtaggaagtgagctgttcagaggcaggagggtctattctttgccaaaggggggaccagaattccccatgcgagctgtttgaggactgggatgccgagaacgcgagcgatccgagcagggtttgtctgggcaccgtcggggtaggatccggaacgcattcggaaggctttttgcaagcatttacttggaaggagaacttgggatctttctgggaaccccccgccccggctggattggccgagcaagcctggaaaatggtaaatgatcatttggatcaattacaggcttttagctggcttgtctgtcataattcatgattcggggctgggaaaaagaccaacagcctacgtgccaaaaaaggggcagagtttgatggagttgggtggacttttctatgccatttgcctccacacctagaggataagcacttttgcagacattcagtgcaagggagatcatgtttgactgtatggatgttctgtcagtgagtcctgggcaaatcctggatttctacactgcgagtccgtcttcctgcatgctccaggagaaagctctcaaagcatgcttcagtggattgacccaaaccgaatggcagcatcggcacactgctcaatcaattgaaacacagagcaccagctctgaggaactcgtcccaagccccccatctccacttcctccccctcgagtgtacaaaccctgcttcgtctgccaggacaaatcatcagggtaccactatggggtcagcgcctgtgagggatgtaagggctttttccgcagaagtattcagaagaatatgatttacacttgtcaccgagataagaactgtgttattaataaagtcaccaggaatcgatgccaatactgtcgactccagaagtgctttgaagtgggaatgtccaaagaatctgtcaggaatgacaggaacaagaaaaagaaggagacttcgaagcaagaatgcacagagagctatgaaatgacagctgagttggacgatctcacagagaagatccgaaaagctcaccaggaaactttcccttcactctgccagctgggtaaatacaccacgaattccagtgctgaccatcgagtccgactggacctgggcctctgggacaaattcagtgaactggccaccaagtgcattattaagatcgtggagtttgctaaacgtctgcctggtttcactggcttgaccatcgcagaccaaattaccctgctgaaggccgcctgcctggacatcctgattcttagaatttgcaccaggtataccccagaacaagacaccatgactttctcagacggccttaccctaaatcgaactcagatgcacaatgctggatttggtcctctgactgaccttgtgttcacctttgccaaccagctcctgcctttggaaatggatgacacagaaacaggccttctcagtgccatctgcttaatctgtggagaccgccaggaccttgaggaaccgacaaaagtagataagctacaagaaccattgctggaagcactaaaaatttatatcagaaaaagacgacccagcaagcctcacatgtttccaaagatcttaatgaaaatcacagatctccgtagcatcagtgctaaaggtgcagagcgtgtaattaccttgaaaatggaaattcctggatcaatgccacctctcattcaagaaatgctggagaattctgaaggacatgaacccttgaccccaagttcaagtgggaacacagcagagcacagtcctagcatctcacccagctcagtggaaaacagtggggtcagtcagtcaccactcgtgcaataagacattttctagctacttcaaacattccccagtaccttcagttccaggatttaaaatgcaagaaaaaacatttttactgctgcttagtttttggactgaaaagatattaaaactcaagaaggaccaagaagttttcatatgtatcaatatatatactcctcactgtgtaacttacctagaaatacaaacttttccaattttaaaaaatcagccatttcatgcaaccagaaactagttaaaagcttctattttcctctttgaacactcaagatgcatggcaaagacccagtcaaaatgatttacccctggttaagtttctgaagactttgtacatacagaagtatggctctgttctttctatactgtatgtttggtgctttccttttgtcttgcatactcaaaataaccatgacaccaaggttatgaaatagactactgtacacgtctacctaggttcaaaaagataactgtcttgctttcatggaatagtcaagacatcaaggtaaggaaacaggactattgacaggactattgtacagtatgacaagataaggctgaagatattctactttagttagtatggaagcttgtctttgctctttctgatgctctcaaactgcatcttttatttcatgttgcccagtaaaagtatacaaattccctgcactagcagaagagaattctgtatcagtgtaactgccagttcagttaatcaaatgtcatttgttcaattgttaatgtcactttaaattaaaagtggtttattacttgtttaatgacataactacacagttagttaaaaaaaatttttttacagtaatgatagcctccaaggcagaaacacttttcagtgttaagtttttgtttacttgttcacaagccattagggaaatttcatgggataattagcaggctggtctaccactggaccatgtaactctagtgtccttcctgattcatgcctgatattgggatttttttccagcccttcttgatgccaagggctaattatattacatcccaaagaaacaggcatagaatctgcctcctttgaccttgttcaatcactatgaagcagagtgaaagctgtggtagagtggttaacagatacaagtgtcagtttcttagttctcatttaagcactactggaatttttttttttgatatattagcaagtctgtgatgtactttcactggctctgtttgtacattgagattgtttgtttaacaatgctttctatgttcatatactgtttacctttttccatggactctcctggcaaagaataaaatatatttatttt

SEQ ID NO: 10 - protein, 448 aa, Homo sapiens
MFDCMDVLSVSPGQILDFYTASPSSCMLQEKALKACFSGLTQTEWQHRHTAQSIETQSTSSEELVPSPPSPLPPPRVYKPCFVCQDKSSGYHYGVSACEGCKGFFRRSIQKNMIYTCHRDKNCVINKVTRNRCQYCRLQKCFEVGMSKESVRNDRNKKKKETSKQECTESYEMTAELDDLTEKIRKAHQETFPSLCQLGKYTTNSSADHRVRLDLGLWDKFSELATKCIIKIVEFAKRLPGFTGLTIADQITLLKAACLDILILRICTRYTPEQDTMTFSDGLTLNRTQMHNAGFGPLTDLVFTFANQLLPLEMDDTETGLLSAICLICGDRQDLEEPTKVDKLQEPLLEALKIYIRKRRPSKPHMFPKILMKITDLRSISAKGAERVITLKMEIPGSMPPLIQEMLENSEGHEPLTPSSSGNTAEHSPSISPSSVENSGVSQSPLVQ

SEQ ID NO: 11 - DNA, 2762 bp, Homo sapiens
  CDS (448)...(1458): RAR beta (NR1B2) variant 2
gtgacagaagtagtaggaagtgagctgttcagaggcaggagggtctattctttgccaaaggggggaccagaattccccatgcgagctgtttgaggactgggatgccgagaacgcgagcgatccgagcagggtttgtctgggcaccgtcggggtaggatccggaacgcattcggaaggctttttgcaagcatttacttggaaggagaacttgggatctttctgggaaccccccgccccggctggattggccgagcaagcctggaaaatgcaattgaaacacagagcaccagctctgaggaactcgtcccaagccccccatctccacttcctccccctcgagtgtacaaaccctgcttcgtctgccaggacaaatcatcagggtaccactatggggtcagcgcctgtgagggatgtaagggctttttccgcagaagtattcagaagaatatgatttacacttgtcaccgagataagaactgtgttattaataaagtcaccaggaatcgatgccaatactgtcgactccagaagtgctttgaagtgggaatgtccaaagaatctgtcaggaatgacaggaacaagaaaaagaaggagacttcgaagcaagaatgcacagagagctatgaaatgacagctgagttggacgatctcacagagaagatccgaaaagctcaccaggaaactttcccttcactctgccagctgggtaaatacaccacgaattccagtgctgaccatcgagtccgactggacctgggcctctgggacaaattcagtgaactggccaccaagtgcattattaagatcgtggagtttgctaaacgtctgcctggtttcactggcttgaccatcgcagaccaaattaccctgctgaaggccgcctgcctggacatcctgattcttagaatttgcaccaggtataccccagaacaagacaccatgactttctcagacggccttaccctaaatcgaactcagatgcacaatgctggatttggtcctctgactgaccttgtgttcacctttgccaaccagctcctgcctttggaaatggatgacacagaaacaggccttctcagtgccatctgcttaatctgtggagaccgccaggaccttgaggaaccgacaaaagtagataagctacaagaaccattgctggaagcactaaaaatttatatcagaaaaagacgacccagcaagcctcacatgtttccaaagatcttaatgaaaatcacagatctccgtagcatcagtgctaaaggtgcagagcgtgtaattaccttgaaaatggaaattcctggatcaatgccacctctcattcaagaaatgctggagaattctgaaggacatgaacccttgaccccaagttcaagtgggaacacagcagagcacagtcctagcatctcacccagctcagtggaaaacagtggggtcagtcagtcaccactcgtgcaataagacattttctagctacttcaaacattccccagtaccttcagttccaggatttaaaatgcaagaaaaaacatttttactgctgcttagtttttggactgaaaagatattaaaactcaagaaggaccaagaagttttcatatgtatcaatatatatactcctcactgtgtaacttacctagaaatacaaacttttccaattttaaaaaatcagccatttcatgcaaccagaaactagttaaaagcttctattttcctctttgaacactcaagatgcatggcaaagacccagtcaaaatgatttacccctggttaagtttctgaagactttgtacatacagaagtatggctctgttctttctatactgtatgtttggtgctttccttttgtcttgcatactcaaaataaccatgacaccaaggttatgaaatagactactgtacacgtctacctaggttcaaaaagataactgtcttgctttcatggaatagtcaagacatcaaggtaaggaaacaggactattgacaggactattgtacagtatgacaagataaggctgaagatattctactttagttagtatggaagcttgtctttgctctttctgatgctctcaaactgcatcttttatttcatgttgcccagtaaaagtatacaaattccctgcactagcagaagagaattctgtatcagtgtaactgccagttcagttaatcaaatgtcatttgttcaattgttaatgtcactttaaattaaaagtggtttattacttgtttaatgacataactacacagttagttaaaaaaaatttttttacagtaatgatagcctccaaggcagaaacacttttcagtgttaagtttttgtttacttgttcacaagccattagggaaatttcatgggataattagcaggctggtctaccactggaccatgtaactctagtgtccttcctgattcatgcctgatattgggatttttttccagcccttcttgatgccaagggctaattatattacatcccaaagaaacaggcatagaatctgcctcctttgaccttgttcaatcactatgaagcagagtgaaagctgtggtagagtggttaacagatacaagtgtcagtttcttagttctcatttaagcactactggaatttttttttttgatatattagcaagtctgtgatgtactttcactggctctgtttgtacattgagattgtttgtttaacaatgctttctatgttcatatactgtttacctttttccatggactctcctggcaaagaataaaatatatttatttt

SEQ ID NO: 12 - protein, 336 aa, Homo sapiens
MIYTCHRDKNCVINKVTRNRCQYCRLQKCFEVGMSKESVRNDRNKKKKETSKQECTESYEMTAELDDLTEKIRKAHQETFPSLCQLGKYTTNSSADHRVRLDLGLWDKFSELATKCIIKIVEFAKRLPGFTGLTIADQITLLKAACLDILILRICTRYTPEQDTMTFSDGLTLNRTQMHNAGFGPLTDLVFTFANQLLPLEMDDTETGLLSAICLICGDRQDLEEPTKVDKLQEPLLEALKIYIRKRRPSKPHMFPKILMKITDLRSISAKGAERVITLKMEIPGSMPPLIQEMLENSEGHEPLTPSSSGNTAEHSPSISPSSVENSGVSQSPLVQ

SEQ ID NO: 13 - DNA, 2900 bp, Homo sapiens
  CDS (430)...(1794): RAR  gamma (NR1B3)
gcagagtcagtgtgcggtttgggagaaaatgtgtcggatattttggggcggtcacgtgggcgggcgggctccgagaggccccgggacagtcccagcctagagccgtgcccccccaggagccccccagtacggcgagccccggacattgcgacgctccatccaagagactgcccgacgccgggacctcggggctccgccgcctcccttccccctcccactccagctacggcccagttccctcaacctgacccagtatgtagaagccagtctctgcaggcggccagcgggacttttggaggcccagtgggcaggccaggcagggcgggtacggagcctcccaggctggggcagtgggcatgggcaggggctgtggctgaagacctcgcccgcccactgcagactccaggggactctcacaccgcagctgccatggccaccaataaggagcgactctttgcggctggtgccctggggcctggatctggctacccaggggcaggtttccccttcgccttcccaggggcactcagggggtctccgcctttcgagatgctgagccctagcttccggggcctgggccagcctgacctccccaaggagatggcctctctgtcggtggagacacagagcaccagctcagaggagatggtgcccagctcgccctcgccccctccgcctcctcgggtctacaagccatgcttcgtgtgcaatgacaagtcctctggctaccactatggggtcagctcttgtgaaggctgcaagggcttctttcgccgaagcatccagaagaacatggtgtacacgtgtcaccgcgacaaaaactgtatcatcaacaaggtgaccaggaatcgctgccagtactgccggctacagaagtgcttcgaagtgggcatgtccaaggaagctgtgcgaaatgaccggaacaagaagaagaaagaggtgaaggaagaagggtcacctgacagctatgagctgagccctcagttagaagagctcatcaccaaggtcagcaaagcccatcaggagactttcccctcgctctgccagctgggcaagtataccacgaactccagtgcagaccaccgcgtgcagctggatctggggctgtgggacaagttcagtgagctggctaccaagtgcatcatcaagatcgtggagtttgccaagcggttgcctggctttacagggctcagcattgctgaccagatcactctgctcaaagctgcctgcctagatatcctgatgctgcgtatctgcacaaggtacaccccagagcaggacaccatgaccttctccgacgggctgaccctgaaccggacccagatgcacaatgccggcttcgggcccctcacagaccttgtctttgcctttgctgggcagctcctgcccctggagatggatgacaccgagacagggctgctcagcgccatctgcctcatctgcggagaccgcatggacctggaggagcccgaaaaagtggacaagctgcaggagccactgctggaagccctgaggctgtacgcccggcgccggcggcccagccagccctacatgttcccaaggatgctaatgaaaatcaccgacctccggggcatcagcactaagggagctgaaagggccattactctgaagatggagattccaggcccgatgcctcccttaatccgagagatgctggagaaccctgaaatgtttgaggatgactcctcgcagcctggtccccaccccaatgcctctagcgaggatgaggttcctgggggccagggcaaagggggcctgaagtccccagcctgaccagggcccctgacctccccgctgtgggggttggggcttcaggcagcagactgaccatctcccagaccgccagtgactgggggaggacctgctctgccctctccccaccccttccaatgagctccttgtttttgccaaagtttctaggggtgcctctgtgttcatccccttcctgatctaaccggctccctcgccagtcccgggggcctgccctgctcccaccaggagagagggcaaagggatgagcctgggtttggactctaaaatctcagcactgccccatgggtcctagacttcccagggcaagaggaagaccctgccattccacagccccttcctctgccaggtgcttggctctctgagagcaaacaggaacactagagaccaaaaaggggacaaaggagaagggctgagcccaccttcttgctcctacccttggtgcctaatgctgtgtgatgcacctgcagggtgtgtgctagcctctgtgccccgtccttgtgccaggtcaaggtgggggcaggctgggccctgcatttctggggcaggaacagagggtgaaagggacagatagatgcaggtccattctgcacctcttggctcgggtgcagagttcaccctgtgccctccgttataagtccctcccccagccctgtcatgtgccttgggctcctcctgccctccatctcagccattggggcagggaccctcctacactacagaggggccaggggatccctctctccctagtgccttccaccctttactccccagagcagcttggcccagggaggggggatgctgcttagctgatcccgccctgacccagaggaagcctctatttatttattagcttttgtttacaccgtggaattgaccccttcctccaggggtcttgggtgggggagcccagggcccctgtgacccctcctttcttcctccaatccccagtttgtatttagctgccaaataagattcccattggctccctgtgttctcttggggggtcagggtgctgtcccctcccctctgtttacatctcccctctaccccgctgtatcgcatattgctgagttttctatttttgcaaaataaagtgatggaaactc

SEQ ID NO: 14 - protein, 454 aa, Homo sapiens
MATNKERLFAAGALGPGSGYPGAGFPFAFPGALRGSPPFEMLSPSFRGLGQPDLPKEMASLSVETQSTSSEEMVPSSPSPPPPPRVYKPCFVCNDKSSGYHYGVSSCEGCKGFFRRSIQKNMVYTCHRDKNCIINKVTRNRCQYCRLQKCFEVGMSKEAVRNDRNKKKKEVKEEGSPDSYELSPQLEELITKVSKAHQETFPSLCQLGKYTTNSSADHRVQLDLGLWDKFSELATKCIIKIVEFAKRLPGFTGLSIADQITLLKAACLDILMLRICTRYTPEQDTMTFSDGLTLNRTQMHNAGFGPLTDLVFAFAGQLLPLEMDDTETGLLSAICLICGDRMDLEEPEKVDKLQEPLLEALRLYARRRRPSQPYMFPRMLMKITDLRGISTKGAERAITLKMEIPGPMPPLIREMLENPEMFEDDSSQPGPHPNASSEDEVPGGQGKGGLKSPA

SEQ ID NO: 15 - DNA, 1850 bp, Homo sapiens
  CDS (213)...(1619): PPAR alpha (NR1C1)
ggcccaggctgaagctcagggccctgtctgctctgtggactcaacagtttgtggcaagacaagctcagaactgagaagctgtcaccacagttctggaggctgggaagttcaagatcaaagtgccagcagattcagtgtcatgtgaggacgtgcttcctgcttcatagataagagcttggagctcggcgcacaaccagcaccatctggtcgcgatggtggacacggaaagcccactctgccccctctccccactcgaggccggcgatctagagagcccgttatctgaagagttcctgcaagaaatgggaaacatccaagagatttcgcaatccatcggcgaggatagttctggaagctttggctttacggaataccagtatttaggaagctgtcctggctcagatggctcggtcatcacggacacgctttcaccagcttcgagcccctcctcggtgacttatcctgtggtccccggcagcgtggacgagtctcccagtggagcattgaacatcgaatgtagaatctgcggggacaaggcctcaggctatcattacggagtccacgcgtgtgaaggctgcaagggcttctttcggcgaacgattcgactcaagctggtgtatgacaagtgcgaccgcagctgcaagatccagaaaaagaacagaaacaaatgccagtattgtcgatttcacaagtgcctttctgtcgggatgtcacacaacgcgattcgttttggacgaatgccaagatctgagaaagcaaaactgaaagcagaaattcttacctgtgaacatgacatagaagattctgaaactgcagatctcaaatctctggccaagagaatctacgaggcctacttgaagaacttcaacatgaacaaggtcaaagcccgggtcatcctctcaggaaaggccagtaacaatccaccttttgtcatacatgatatggagacactgtgtatggctgagaagacgctggtggccaagctggtggccaatggcatccagaacaaggaggcggaggtccgcatctttcactgctgccagtgcacgtcagtggagaccgtcacggagctcacggaattcgccaaggccatcccaggcttcgcaaacttggacctgaacgatcaagtgacattgctaaaatacggagtttatgaggccatattcgccatgctgtcttctgtgatgaacaaagacgggatgctggtagcgtatggaaatgggtttataactcgtgaattcctaaaaagcctaaggaaaccgttctgtgatatcatggaacccaagtttgattttgccatgaagttcaatgcactggaactggatgacagtgatatctccctttttgtggctgctatcatttgctgtggagatcgtcctggccttctaaacgtaggacacattgaaaaaatgcaggagggtattgtacatgtgctcagactccacctgcagagcaaccacccggacgatatctttctcttcccaaaacttcttcaaaaaatggcagacctccggcagctggtgacggagcatgcgcagctggtgcagatcatcaagaagacggagtcggatgctgcgctgcacccgctactgcaggagatctacagggacatgtactgagttccttcagatcagccacaccttttccaggagttctgaagctgacagcactacaaaggagacgggggagcagcacgattttgcacaaatatccaccactttaaccttagagcttggacagtctgagctgtaggtaaccggcatattattccatatctttgttttaaccagtacttctaagagcatagaactcaaatgctgggggaggtggctaatctcaggactgggaag

SEQ ID NO: 16 - protein, 468 aa, Homo sapiens
MVDTESPLCPLSPLEAGDLESPLSEEFLQEMGNIQEISQSIGEDSSGSFGFTEYQYLGSCPGSDGSVITDTLSPASSPSSVTYPVVPGSVDESPSGALNIECRICGDKASGYHYGVHACEGCKGFFRRTIRLKLVYDKCDRSCKIQKKNRNKCQYCRFHKCLSVGMSHNAIRFGRMPRSEKAKLKAEILTCEHDIEDSETADLKSLAKRIYEAYLKNFNMNKVKARVILSGKASNNPPFVIHDMETLCMAEKTLVAKLVANGIQNKEAEVRIFHCCQCTSVETVTELTEFAKAIPGFANLDLNDQVTLLKYGVYEAIFAMLSSVMNKDGMLVAYGNGFITREFLKSLRKPFCDIMEPKFDFAMKFNALELDDSDISLFVAAIICCGDRPGLLNVGHIEKMQEGIVHVLRLHLQSNHPDDIFLFPKLLQKMADLRQLVTEHAQLVQIIKKTESDAALHPLLQEIYRDMY

SEQ ID NO: 17 - DNA, 3328 bp, Homo sapiens
  CDS (355)...(1680): PPAR beta/delta (NR1C2) variant 1
gttttggcaggagcgggagaattctgcggagcctgcgggacggcggcggtggcgccgtaggcagccgggacagtgttgtacagtgttttgggcatgcacgtgatactcacacagtggcttctgctcaccaacagatgaagacagatgcaccaacgagggtctggaatggtctggagtggtctggaaagcagggtcagatacccctggaaaactgaagcccgtggagcagtgatctctacaggactgcttcaaggctgatgggaaccaccctgtagaggtccatctgcgttcagacccagacgatgccagagctatgactgggcctgcaggtgtggcgccgaggggagatcagccatggagcagccacaggaggaagcccctgaggtccgggaagaggaggagaaagaggaagtggcagaggcagaaggagccccagagctcaatgggggaccacagcatgcacttccttccagcagctacacagacctctcccggagctcctcgccaccctcactgctggaccaactgcagatgggctgtgacggggcctcatgcggcagcctcaacatggagtgccgggtgtgcggggacaaggcatcgggcttccactacggtgttcatgcatgtgaggggtgcaagggcttcttccgtcgtacgatccgcatgaagctggagtacgagaagtgtgagcgcagctgcaagattcagaagaagaaccgcaacaagtgccagtactgccgcttccagaagtgcctggcactgggcatgtcacacaacgctatccgttttggtcggatgccggaggctgagaagaggaagctggtggcagggctgactgcaaacgaggggagccagtacaacccacaggtggccgacctgaaggccttctccaagcacatctacaatgcctacctgaaaaacttcaacatgaccaaaaagaaggcccgcagcatcctcaccggcaaagccagccacacggcgccctttgtgatccacgacatcgagacattgtggcaggcagagaaggggctggtgtggaagcagttggtgaatggcctgcctccctacaaggagatcagcgtgcacgtcttctaccgctgccagtgcaccacagtggagaccgtgcgggagctcactgagttcgccaagagcatccccagcttcagcagcctcttcctcaacgaccaggttacccttctcaagtatggcgtgcacgaggccatcttcgccatgctggcctctatcgtcaacaaggacgggctgctggtagccaacggcagtggctttgtcacccgtgagttcctgcgcagcctccgcaaacccttcagtgatatcattgagcctaagtttgaatttgctgtcaagttcaacgccctggaacttgatgacagtgacctggccctattcattgcggccatcattctgtgtggagaccggccaggcctcatgaacgttccacgggtggaggctatccaggacaccatcctgcgtgccctcgaattccacctgcaggccaaccaccctgatgcccagtacctcttccccaagctgctgcagaagatggctgacctgcggcaactggtcaccgagcacgcccagatgatgcagcggatcaagaagaccgaaaccgagacctcgctgcaccctctgctccaggagatctacaaggacatgtactaacggcggcacccaggcctccctgcagactccaatggggccagcactggaggggcccacccacatgacttttccattgaccagctctcttcctgtctttgttgtctccctctttctcagttcctctttcttttctaattcctgttgctctgtttcttcctttctgtaggtttctctcttcccttctcccttgccctccctttctctctccaccccccacgtctgtcctcctttcttattctgtgagatgttttgtattatttcaccagcagcatagaacaggacctctgcttttgcacaccttttccccaggagcagaagagagtggggcctgccctctgccccatcattgcacctgcaggcttaggtcctcacttctgtctcctgtcttcagagcaaaagacttgagccatccaaagaaacactaagctctctgggcctgggttccagggaaggctaagcatggcctggactgactgcagccccctatagtcatggggtccctgctgcaaaggacagtgggcaggaggccccaggctgagagccagatgcctccccaagactgtcattgcccctccgatgctgaggccacccactgacccaactgatcctgctccagcagcacacctcagccccactgacacccagtgtccttccatcttcacactggtttgccaggccaatgttgctgatggcccctccagcacacacacataagcactgaaatcactttacctgcaggctccatgcacctcccttccctccctgaggcaggtgagaacccagagagaggggcctgcaggtgagcaggcagggctgggccaggtctccggggaggcaggggtcctgcaggtcctggtgggtcagcccagcacctgctcccagtgggagcttcccgggataaactgagcctgttcattctgatgtccatttgtcccaatagctctactgccctccccttcccctttactcagcccagctggccacctagaagtctccctgcacagcctctagtgtccggggaccttgtgggaccagtcccacaccgctggtccctgccctcccctgctcccaggttgaggtgcgctcacctcagagcagggccaaagcacagctgggcatgccatgtctgagcggcgcagagccctccaggcctgcaggggcaaggggctggctggagtctcagagcacagaggtaggagaactggggttcaagcccaggcttcctgggtcctgcctggtcctccctcccaaggagccattctgtgtgtgactctgggtggaagtgcccagcccctgcccctacgggcgctgcagcctcccttccatgccccaggatcactctctgctggcaggattcttcccgctccccacctacccagctgatgggggttggggtgcttcctttcaggccaaggctatgaagggacagctgctgggacccacctccccctccccggccacatgccgcgtccctgccccgacccgggtctggtgctgaggatacagctcttctcagtgtctgaacaatctccaaaattgaaatgtatatttttgctaggagccccagcttcctgtgtttttaatataaatagtgtacacagactgacgaaactttaaataaatgggaattaaatatttaaaaaaaaaa

SEQ ID NO: 18 - protein, 441 aa, Homo sapiens
MEQPQEEAPEVREEEEKEEVAEAEGAPELNGGPQHALPSSSYTDLSRSSSPPSLLDQLQMGCDGASCGSLNMECRVCGDKASGFHYGVHACEGCKGFFRRTIRMKLEYEKCERSCKIQKKNRNKCQYCRFQKCLALGMSHNAIRFGRMPEAEKRKLVAGLTANEGSQYNPQVADLKAFSKHIYNAYLKNFNMTKKKARSILTGKASHTAPFVIHDIETLWQAEKGLVWKQLVNGLPPYKEISVHVFYRCQCTTVETVRELTEFAKSIPSFSSLFLNDQVTLLKYGVHEAIFAMLASIVNKDGLLVANGSGFVTREFLRSLRKPFSDIIEPKFEFAVKFNALELDDSDLALFIAAIILCGDRPGLMNVPRVEAIQDTILRALEFHLQANHPDAQYLFPKLLQKMADLRQLVTEHAQMMQRIKKTETETSLHPLLQEIYKDMY

SEQ ID NO: 19 - DNA, 1977 bp, Homo sapiens
  CDS (259)...(1344): PPAR beta/delta (NR1C2) variant 2
gttttggcaggagcgggagaattctgcggagcctgcgggacggcggcggtggcgccgtaggcagccgggacagtgttgtacagtgttttgggcatgcacgtgatactcacacagtggcttctgctcaccaacagatgaagacagatgcaccaacgaggctgatgggaaccaccctgtagaggtccatctgcgttcagacccagacgatgccagagctatgactgggcctgcaggtgtggcgccgaggggagatcagccatggagcagccacaggaggaagcccctgaggtccgggaagaggaggagaaagaggaagtggcagaggcagaaggagccccagagctcaatgggggaccacagcatgcacttccttccagcagctacacagacctctcccggagctcctcgccaccctcactgctggaccaactgcagatgggctgtgacggggcctcatgcggcagcctcaacatggagtgccgggtgtgcggggacaaggcatcgggcttccactacggtgttcatgcatgtgaggggtgcaagggcttcttccgtcgtacgatccgcatgaagctggagtacgagaagtgtgagcgcagctgcaagattcagaagaagaaccgcaacaagtgccagtactgccgcttccagaagtgcctggcactgggcatgtcacacaacgctatccgttttggtcggatgccggaggctgagaagaggaagctggtggcagggctgactgcaaacgaggggagccagtacaacccacaggtggccgacctgaaggccttctccaagcacatctacaatgcctacctgaaaaacttcaacatgaccaaaaagaaggcccgcagcatcctcaccggcaaagccagccacacggcgccctttgtgatccacgacatcgagacattgtggcaggcagagaaggggctggtgtggaagcagttggtgaatggcctgcctccctacaaggagatcagcgtgcacgtcttctaccgctgccagtgcaccacagtggagaccgtgcgggagctcactgagttcgccaagagcatccccagcttcagcagcctcttcctcaacgaccaggttacccttctcaagtatggcgtgcacgaggccatcttcgccatgctggcctctatcgtcaacaaggacgggctgctggtagccaacggcagtggctttgtcacccgtgagttcctgcgcagcctccgcaaacccttcagtgatatcattgagcctaagtttgaatttgctgtcaagttcaacgccctggaacttgatgacagtgacctggccctattcattgcggccatcattctgtgtggaggtgagtgagagtggggcaggtgggctggcctggcacacccagtcgtcctgggggttggccctcactgcagggcactgtgcctgagctctgacagtgtggggaagtgtccctgtgatcttggcagtggaacatgcaaggcactgactgagcatgcaggatcagctccatctcattatgtacgtagatagaggtggagacaggaaaaagactaagccagacgtggtggctcacacctgtaatcccagcactttggcaggccgaggcgggtggatcacttgaggtcaggagttcgaaaccagcctggccaacatggtgaaaccccgtctctactaaaaatacaaaaaattagccagatgtggtggcacgcgcctgtaatcccagctacttgggaggctgagccaggagaatcgcttgaacccgagaggtggaggttgcagtgagccaaaatcccaccactgcactccagcctgggtgacagagtgagaccctgtctcaaaaaaaaggaaaaggactaacaggcagtatgctgtcatgttaatgtggggtggaaaaattgtctgcattttttctgcatttttaaaattccaacacaataaatacaataataactatgctaaaaaaaaaaaaaaaaaaaaaaaaaa

SEQ ID NO: 20 - protein, 361 aa, Homo sapiens
MEQPQEEAPEVREEEEKEEVAEAEGAPELNGGPQHALPSSSYTDLSRSSSPPSLLDQLQMGCDGASCGSLNMECRVCGDKASGFHYGVHACEGCKGFFRRTIRMKLEYEKCERSCKIQKKNRNKCQYCRFQKCLALGMSHNAIRFGRMPEAEKRKLVAGLTANEGSQYNPQVADLKAFSKHIYNAYLKNFNMTKKKARSILTGKASHTAPFVIHDIETLWQAEKGLVWKQLVNGLPPYKEISVHVFYRCQCTTVETVRELTEFAKSIPSFSSLFLNDQVTLLKYGVHEAIFAMLASIVNKDGLLVANGSGFVTREFLRSLRKPFSDIIEPKFEFAVKFNALELDDSDLALFIAAIILCGGE

SEQ ID NO: 21 - DNA, 1734 bp, Homo sapiens
  CDS (105)...(1532): PPAR gamma (NR1C3) variant 1
cactcggagcccgagcccgagccgcagccgccgcctggggcgcttgggtcggcctcgaggacaccggagaggggcgccacgccgccgtggccgcagaaatgaccatggttgacacagagatgccattctggcccaccaactttgggatcagctccgtggatctctccgtaatggaagaccactcccactcctttgatatcaagcccttcactactgttgacttctccagcatttctactccacattacgaagacattccattcacaagaacagatccagtggttgcagattacaagttgacctgaaacttcaagagtaccaaagtgcaatcaaagtggagcctgcatctccaccttattattctgagaagactcagctctacaataagcctcatgaagagccttccaactccctcatggcaattgaatgtcgtgtctgtggagataaagcttctggatttcactatggagttcatgcttgtgaaggatgcaagggtttcttccggagaacaatcagattgaagcttatctatgacagatgtgatcttaactgtcggatccacaaaaaaagtagaaataaatgtcagtactgtcggtttcagaaatgccttgcagtggggatgtctcataatgccatcaggtttgggcggatgccacaggccgagaaggagaagctgttggcggagatctccagtgatatcgaccagctgaatccagagtccgctgacctccgggccctggcaaaacatttgtatgactcatacataaagtccttcccgctgaccaaagcaaaggcgagggcgatcttgacaggaaagacaacagacaaatcaccattcgttatctatgacatgaattccttaatgatgggagaagataaaatcaagttcaaacacatcacccccctgcaggagcagagcaaagaggtggccatccgcatctttcagggctgccagtttcgctccgtggaggctgtgcaggagatcacagagtatgccaaaagcattcctggttttgtaaatcttgacttgaacgaccaagtaactctcctcaaatatggagtccacgagatcatttacacaatgctggcctccttgatgaataaagatggggttctcatatccgagggccaaggcttcatgacaagggagtttctaaagagcctgcgaaagccttttggtgactttatggagcccaagtttgagtttgctgtgaagttcaatgcactggaattagatgacagcgacttggcaatatttattgctgtcattattctcagtggagaccgcccaggtttgctgaatgtgaagcccattgaagacattcaagacaacctgctacaagccctggagctccagctgaagctgaaccaccctgagtcctcacagctgtttgccaagctgctccagaaaatgacagacctcagacagattgtcacggaacacgtgcagctactgcaggtgatcaagaagacggagacagacatgagtcttcacccgctcctgcaggagatctacaaggacttgtactagcagagagtcctgagccactgccaacatttcccttcttccagttgcactattctgagggaaaatctgacacctaagaaatttactgtgaaaaagcattttaaaaagaaaaggttttagaatatgatctattttatgcatattgtttataaagacacatttacaatttacttttaatattaaaaattaccatattatgaaattgc

SEQ ID NO: 22 - protein, 451 aa, Homo sapiens [sequence omitted]

SEQ ID NO: 23 - DNA, 1854 bp, Homo sapiens
  CDS (134)...(1651): PPAR gamma (NR1C3) variant 2
actgatgtcttgactcatgggtgtattcacaaattctgttacttcaagtctttttcttttaacggattgatcttttgctagatagagacaaaatatcagtgtgaattacagcaaacccctattccatgctgttatgggtgaaactctgggagattctcctattgacccagaaagcgattccttcactgatacactgtctgcaaacatatcacaagaaatgaccatggttgacacagagatgccattctggcccaccaactttgggatcagctccgtggatctctccgtaatggaagaccactcccactcctttgatatcaagcccttcactactgttgacttctccagcatttctactccacattacgaagacattccattcacaagaacagatccagtggttgcagattacaagtatgacctgaaacttcaagagtaccaaagtgcaatcaaagtggagcctgcatctccaccttattattctgagaagactcagctctacaataagcctcatgaagagccttccaactccctcatggcaattgaatgtcgtgtctgtggagataaagcttctggatttcactatggagttcatgcttgtgaaggatgcaagggtttcttccggagaacaatcagattgaagcttatctatgacagatgtgatcttaactgtcggatccacaaaaaaagtagaaataaatgtcagtactgtcggtttcagaaatgccttgcagtggggatgtctcataatgccatcaggtttgggcggatgccacaggccgagaaggagaagctgttggcggagatctccagtgatatcgaccagctgaatccagagtccgctgacctccgggccctggcaaaacatttgtatgactcatacataaagtccttcccgctgaccaaagcaaaggcgagggcgatcttgacaggaaagacaacagacaaatcaccattcgttatctatgacatgaattccttaatgatgggagaagataaaatcaagttcaaacacatcacccccctgcaggagcagagcaaagaggtggccatccgcatctttcagggctgccagtttcgctccgtggaggctgtgcaggagatcacagagtatgccaaaagcattcctggttttgtaaatcttgacttgaacgaccaagtaactctcctcaaatatggagtccacgagatcatttacacaatgctggcctccttgatgaataaagatggggttctcatatccgagggccaaggcttcatgacaagggagtttctaaagagcctgcgaaagccttttggtgactttatggagcccaagtttgagtttgctgtgaagttcaatgcactggaattagatgacagcgacttggcaatatttattgctgtcattattctcagtggagaccgcccaggtttgctgaatgtgaagcccattgaagacattcaagacaacctgctacaagccctggagctccagctgaagctgaaccaccctgagtcctcacagctgtttgccaagctgctccagaaaatgacagacctcagacagattgtcacggaacacgtgcagctactgcaggtgatcaagaagacggagacagacatgagtcttcacccgctcctgcaggagatctacaaggacttgtactagcagagagtcctgagccactgccaacatttcccttcttccagttgcactattctgagggaaaatctgacacctaagaaatttactgtgaaaaagcgttttaaaaagaaaaggatttagaatatgatctattttatgcatattgtttataaagacacatttacaatttacttttaatattaaaaattaccatattatgaaattgc

SEQ ID NO: 24 - protein, 505 aa, Homo sapiens
MGETLGDSPIDPESDSFTDTLSANISQEMTMVDTEMPFWPTNFGISSVDLSVMEDHSHSFDIKPFTTVDFSSISTPHYEDIPFTRTDPVVADYKYDLKLQEYQSAIKVEPASPPYYSEKTQLYNKPHEEPSNSLMAIECRVCGDKASGFHYGVHACEGCKGFFRRTIRLKLIYDRCDLNCRIHKKSRNKCQYCRFQKCLAVGMSHNAIRFGRMPQAEKEKLLAEISSDIDQLNPESADLRALAKHLYDSYIKSFPLTKAKARAILTGKTTDKSPFVIYDMNSLMMGEDKIKFKHITPLQEQSKEVAIRIFQGCQFRSVEAVQEITEYAKSIPGFVNLDLNDQVTLLKYGVHEIIYTMLASLMNKDGVLISEGQGFMTREFLKSLRKPFGDFMEPKFEFAVKFNALELDDSDLAIFIAVIILSGDRPGLLNVKPIEDIQDNLLQALELQLKLNHPESSQLFAKLLQKMTDLRQIVTEHVQLLQVIKKTETDMSLHPLLQEIYKDLY

SEQ ID NO: 25 - DNA, 1767 bp, Homo sapiens
  CDS (128)...(1555): PPAR gamma (NR1C3) variant 3
ccagaagcctgcatttctgcattctgcttaattccctttccttagatttgaaagaagccaacactaaaccacaaatatacaacaaggccattttctcaaacgagagtcagcctttaacgaaatgaccatggttgacacagagatgccattctggcccaccaactttgggatcagctccgtggatctctccgtaatggaagaccactcccactcctttgatatcaagcccttcactactgttgacttctccagcatttctactccacattacgaagacattccattcacaagaacagatccagtggttgcagattacaagtatgacctgaaacttcaagagtaccaaagtgcaatcaaagtggagcctgcatctccaccttattattctgagaagactcagctctacaataagcctcatgaagagccttccaactccctcatggcaattgaatgtcgtgtctgtggagataaagcttctggatttcactatggagttcatgcttgtgaaggatgcaagggtttcttccggagaacaatcagattgaagcttatctatgacagatgtgatcttaactgtcggatccacaaaaaaagtagaaataaatgtcagtactgtcggtttcagaaatgccttgcagtggggatgtctcataatgccatcaggtttgggcggatgccacaggccgagaaggagaagctgttggcggagatctccagtgatatcgaccagctgaatccagagtccgctgacctccgggccctggcaaaacatttgtatgactcatacataaagtccttcccgctgaccaaagcaaaggcgagggcgatcttgacaggaaagacaacagacaaatcaccattcgttatctatgacatgaattccttaatgatgggagaagataaaatcaagttcaaacacatcacccccctgcaggagcagagcaaagaggtggccatccgcatctttcagggctgccagtttcgctccgtggaggctgtgcaggagatcacagagtatgccaaaagcattcctggttttgtaaatcttgacttgaacgaccaagtaactctcctcaaatatggagtccacgagatcatttacacaatgctggcctccttgatgaataaagatggggttctcatatccgagggccaaggcttcatgacaagggagtttctaaagagcctgcgaaagccttttggtgactttatggagcccaagtttgagtttgctgtgaagttcaatgcactggaattagatgacagcgacttggcaatatttattgctgtcattattctcagtggagaccgcccaggtttgctgaatgtgaagcccattgaagacattcaagacaacctgctacaagccctggagctccagctgaagctgaaccaccctgagtcctcacagctgtttgccaagctgctccagaaaatgacagacctcagacagattgtcacggaacacgtgcagctactgcaggtgatcaagaagacggagacagacatgagtcttcacccgctcctgcaggagatctacaaggacttgtactagcagagagtcctgagccactgccaacatttcccttcttccagttgcactattctgagggaaaatctgacacctaagaaatttactgtgaaaaagcattttaaaaagaaaaggttttagaatatgatctattttatgcatattgtttataaagacacatttacaatttacttttaatattaaaaattaccatattatgaaaaaaaaaaaaaaaa

SEQ ID NO: 26 - protein, 475 aa, Homo sapiens
MVDTEMPFWPTNFGISSVDLSVMEDHSHSFDIKPFTTVDFSSISTPHYEDIPFTRTDPVVADYKYDLKLQEYQSAIKVEPASPPYYSEKTQLYNKPHEEPSNSLMAIECRVCGDKASGFHYGVHACEGCKGFFRRTIRLKLIYDRCDLNCRIHKKSRNKCQYCRFQKCLAVGMSHNAIRFGRMPQAEKEKLLAEISSDIDQLNPESADLRALAKHLYDSYIKSFPLTKAKARAILTGKTTDKSPFVIYDMNSLMMGEDKIKFKHITPLQEQSKEVAIRIFQGCQFRSVEAVQEITEYAKSIPGFVNLDLNDQVTLLKYGVHEIIYTMLASLMNKDGVLISEGQGFMTREFLKSLRKPFGDFMEPKFEFAVKFNALELDDSDLAIFIAVIILSGDRPGLLNVKPIEDIQDNLLQALELQLKLNHPESSQLFAKLLQKMTDLRQIVTEHVQLLQVIKKTETDMSLHPLLQEIYKDLY

SEQ ID NO: 27 - DNA, 1836 bp, Homo sapiens
  CDS (179)...(1606): PPAR gamma (NR1C3) variant 4
cactcggagcccgagcccgagccgcagccgccgcctggggcgcttgggtcggcctcgaggacaccggagaggggcgccacgccgccgtggccgcagatttgaaagaagccgacactaaaccaccaatatacaacaaggccattttgtcaaacgagagtcagcctttaacgaaatgaccatggttgacacagagatgccattctggcccaccaactttgggatcagctccgtggatctctccgtaatggaagaccactcccactcctttgatatcaagcccttcactactgttgacttctccagcatttctactccacattacgaagacattccattcacaagaacagatccagtggttgcagattacaagtatgacctgaaacttcaagagtaccaaagtgcaatcaaagtggagcctgcatctccaccttattattctgagaagactcagctctacaataagcctcatgaagagccttccaactccctcatggcaattgaatgtcgtgtctgtggagataaagcttctggatttcactatggagttcatgcttgtgaaggatgcaagggtttcttccggagaacaatcagattgaagcttatctatgacagatgtgatcttaactgtcggatccacaaaaaaagtagaaataaatgtcagtactgtcggtttcagaaatgccttgcagtggggatgtctcataatgccatcaggtttgggcggatgccacaggccgagaaggagaagctgttggcggagatctccagtgatatcgaccagctgaatccagagtccgctgacctccgggccctggcaaaacatttgtatgactcatacataaagtccttcccgctgaccaaagcaaaggcgagggcgatcttgacaggaaagacaacagacaaatcaccattcgttatctatgacatgaattccttaatgatgggagaagataaaatcaagttcaaacacatcacccccctgcaggagcagagcaaagaggtggccatccgcatctttcagggctgccagtttcgctccgtggaggctgtgcaggagatcacagagtatgccaaaagcattcctggttttgtaaatcttgacttgaacgaccaagtaactctcctcaaatatggagtccacgagatcatttacacaatgctggcctccttgatgaataaagatggggttctcatatccgagggccaaggcttcatgacaagggagtttctaaagagcctgcgaaagccttttggtgactttatggagcccaagtttgagtttgctgtgaagttcaatgcactggaattagatgacagcgacttggcaatatttattgctgtcattattctcagtggagaccgcccaggtttgctgaatgtgaagcccattgaagacattcaagacaacctgctacaagccctggagctccagctgaagctgaaccaccctgagtcctcacagctgtttgccaagctgctccagaaaatgacagacctcagacagattgtcacggaacacgtgcagctactgcaggtgatcaagaagacggagacagacatgagtcttcacccgctcctgcaggagatctacaaggacttgtactagcagagagtcctgagccactgccaacatttcccttcttccagttgcactattctgagggaaaatctgacacctaagaaatttactgtgaaaaagcattttaaaaagaaaaggttttagaatatgatctattttatgcatattgtttataaagacacatttacaatttacttttaatattaaaaattaccatattatgaaaaaaaaaaaaaaaaaaaaaaaaaaaaaaaaaa

SEQ ID NO: 28 - protein, 475 aa, Homo sapiens; identical to SEQ ID NO: 26

SEQ ID NO: 29 - DNA, 2768 bp, Homo sapiens
  CDS (628)...(2472): RevERB alpha (NR1D1)
ccgaggcgctccctgggatcacatggtacctgctccagtgccgcgtgcggcccgggaaccctgggctgctggcgcctgcgcagagccctctgtcccagggaaaggctcgggcaaaaggcggctgagattggcagagtgaaatattactgccgagggaacgtagcagggcacacgtctcgcctctttgcgactcggtgccccgtttctccccatcacctacttacttcctggttgcaacctctcttcctctgggacttttgcaccgggagctccagattcgctaccccgcagcgctgcggagccggcaggcagaggcaccccgtacactgcagagacccgaccctccttgctaccttctagccagaactactgcaggctgattccccctacacactctctctgctcttcccatgcaaagcagaactccgttgcctcaacgtccaacccttctgcagggctgcagtccggccaccccaagaccttgctgcagggtgcttcggatcctgatcgtgagtcgcggggtccactccccgcccttagccagtgcccagggggcaacagcggcgatcgcaacctctagtttgagtcaaggtccagtttgaatgaccgctctcagctggtgaagacatgacgaccctggactccaacaacaacacaggtggcgtcatcacctacattggctccagtggctcctccccaagccgcaccagccctgaatccctctatagtgacaactccaatggcagcttccagtccctgacccaaggctgtcccacctacttcccaccatcccccactggctccctcacccaagacccggctcgctcctttgggagcattccacccagcctgagtgatgacggctccccttcttcctcatcttcctcgtcgtcatcctcctcctccttctataatgggagcccccctgggagtctacaagtggccatggaggacagcagccgagtgtcccccagcaagagcaccagcaacatcaccaagctgaatggcatggtgttactgtgtaaagtgtgtggggacgttgcctcgggcttccactacggtgtgcacgcctgcgagggctgcaagggctttttccgtcggagcatccagcagaacatccagtacaaaaggtgtctgaagaatgagaattgctccatcgtccgcatcaatcgcaaccgctgccagcaatgtcgcttcaagaagtgtctctctgtgggcatgtctcgagacgctgtgcgttttgggcgcatccccaaacgagagaagcagcggatgcttgctgagatgcagagtgccatgaacctggccaacaaccagttgagcagccagtgcccgctggagacttcacccacccagcaccccaccccaggccccatgggcccctcgccaccccctgctccggtcccctcacccctggtgggcttctcccagtttccacaacagctgacgcctcccagatccccaagccctgagcccacagtggaggatgtgatatcccaggtggcccgggcccatcgagagatcttcacctacgcccatgacaagctgggcagctcacctggcaacttcaatgccaaccatgcatcaggtagccctccagccaccaccccacatcgctgggaaaatcagggctgcccacctgcccccaatgacaacaacaccttggctgcccagcgtcataacgaggccctaaatggtctgcgccaggctccctcctcctaccctcccacctggcctcctggccctgcacaccacagctgccaccagtccaacagcaacgggcaccgtctatgccccacccacgtgtatgcagccccagaaggcaaggcacctgccaacagtccccggcagggcaactcaaagaatgttctgctggcatgtcctatgaacatgtacccgcatggacgcagtgggcgaacggtgcaggagatctgggaggatttctccatgagcttcacgcccgctgtgcgggaggtggtagagtttgccaaacacatcccgggcttccgtgacctttctcagcatgaccaagtcaccctgcttaaggctggcacctttgaggtgctgatggtgcgctttgcttcgttgttcaacgtgaaggaccagacagtgatgttcctaagccgcaccacctacagcctgcaggagcttggtgccatgggcatgggagacctgctcagtgccatgttcgacttcagcgagaagctcaactccctggcgcttaccgaggaggagctgggcctcttcaccgcggtggtgcttgtctctgcagaccgctcgggcatggagaattccgcttcggtggagcagctccaggagacgctgctgcgggctcttcgggctctggtgctgaagaaccggcccttggagacttcccgcttcaccaagctgctgctcaagctgccggacctgcggaccctgaacaacatgcattccgagaagctgctgtccttccgggtggacgcccagtgacccgcccggccggccttctgccgctgcccccttgtacagaatcgaactctgcacttctctctcctttacgagacgaaaaggaaaagcaaaccagaatcttatttatattgttataaaatattccaagatgagcctctggccccctgagccttcttgtaaatacctgcctccctcccccatcaccgaacttcccctcctcccctatttaaaccactctgtctcccccacaaccctcccctggccctctgatttgttctgttcctgtctcaaatccaatagttcacagctgagctggg

SEQ ID NO: 30 - protein, 614 aa, Homo sapiens
MTTLDSNNNTGGVITYIGSSGSSPSRTSPESLYSDNSNGSFQSLTQGCPTYFPPSPTGSLTQDPARSFGSIPPSLSDDGSPSSSSSSSSSSSSFYNGSPPGSLQVAMEDSSRVSPSKSTSNITKLNGMVLLCKVCGDVASGFHYGVHACEGCKGFFRRSIQQNIQYKRCLKNENCSIVRINRNRCQQCRFKKCLSVGMSRDAVRFGRIPKREKQRMLAEMQSAMNLANNQLSSQCPLETSPTQHPTPGPMGPSPPPAPVPSPLVGFSQFPQQLTPPRSPSPEPTVEDVISQVARAHREIFTYAHDKLGSSPGNFNANHASGSPPATTPHRWENQGCPPAPNDNNTLAAQRHNEALNGLRQAPSSYPPTWPPGPAHHSCHQSNSNGHRLCPTHVYAAPEGKAPANSPRQGNSKNVLLACPMNMYPHGRSGRTVQEIWEDFSMSFTPAVREVVEFAKHIPGFRDLSQHDQVTLLKAGTFEVLMVRFASLFNVKDQTVMFLSRTTYSLQELGAMGMGDLLSAMFDFSEKLNSLALTEEELGLFTAVVLVSADRSGMENSASVEQLQETLLRALRALVLKNRPLETSRFTKLLLKLPDLRTLNNMHSEKLLSFRVDAQ

SEQ ID NO: 31 - DNA, 4349 bp, Homo sapiens
  CDS (268)...(2007): RevERB beta (NR1D2)
gggggctgcaggaagccgccgcgccgccgcttttgttgtcagggacccagcgaggagcgccgctcgccggccgccgccaccctctctcgctgcagcctgctgtgcgctgcacggcctggggcccgggagccccgcccgctctgcccatgagggggccccgcgaccaccgctgcttccagcccggggcggcgcggcgctgaggcggcggcggcggcgctgccccctctgcgggaagcgggcggccccggccgcctccgcgagggcaccatggaggtgaatgcaggaggtgtgattgcctatatcagttcttccagctcagcctcaagccatgcctcttgtcacagtgagggttctgagaatagtttccagtcctcctcctcttctgttccatcttctccaaatagctctaattctgataccaatggtaatcccaagaatggtgatctcgccaatattgaaggcatcttgaagaatgatcgaatagattgttctatgaaaacaagcaaatcgagtgcacctgggatgacaaaaagtcatagtggtgtgacaaaatttagtggcatggttctactgtgtaaagtctgtggggatgtggcgtcaggattccactatggagttcatgcttgcgaaggctgtaagggtttctttcggagaagtattcaacaaaacatccagtacaagaagtgcctgaagaatgaaaactgttctataatgagaatgaataggaacagatgtcagcaatgtcgcttcaaaaagtgtctgtctgttggaatgtcaagagatgctgttcggtttggtcgtattcctaagcgtgaaaaacagaggatgctaattgaaatgcaaagtgcaatgaagaccatgatgaacagccagttcagtggtcacttgcaaaatgacacattagtagaacatcatgaacagacagccttgccagcccaggaacagctgcgacccaagccccaactggagcaagaaaacatcaaaagctcttctcctccatcttctgattttgcaaaggaagaagtgattggcatggtgaccagagctcacaaggatacctttatgtataatcaagagcagcaagaaaactcagctgagagcatgcagcccaagagaggagaacggattcgcaagaacatggagcaatataatttaaatcatgatcattgcggcaatgggcttagcagccattttccctgtagtgagagccagcagcatctcaatggacagttcaaagggaggaatataatgcattacccaaatggtcatgccatttgtattgcaaatggacattgtatgaacttctccaatgcttatactcaaagagtatgtgatagagttccgatagatggattttctcagaatgagaacaagaatagttacctgtgcaacactggaggaagaatgcatctggtttgtccaatgagtaagtctccatatgtggatcctcataaatcaggacatgaaatctgggaagaattttcgatgagcttcactccagcagtgaaagaagtggtggaatttgcaaagcgtattcctgggttcagagatctctctcagcatgaccaggtcaaccttttaaaggctgggacttttgaggttttaatggtacggttcgcatcattatttgatgcaaaggaacgtactgtcacctttttaagtggaaagaaatatagtgtggatgatttacactcaatgggagcaggggatctgctaaactctatgtttgaatttagtgagaagctaaatgccctccaacttagtgatgaagagatgagtttgtttacagctgttgtcctggtatctgcagatcgatctggaatagaaaacgtcaactctgtggaggctttgcaggaaactctcattcgtgcactaaggaccttaataatgaaaaaccatccaaatgaggcctctatttttacaaaactgcttctaaagttgccagatcttcgatctttaaacaacatgcactctgaggagctcttggcctttaaagttcacccttaaggcctttgtttatttaaacatgaactgatggtaactgtacattttgtgctaaaatgcatatttatatgtgtataccatatgtggagatagaaaagacctttaagacaataaaagattgtaggctatctctgtaatcatgcaatagctgttcggattgagaactcttcagccatgattagacgttgactgcatctccctgatagaccaatcagctgtgtcgcacttaaactggagaagttacactgaagtataatcacactgaatgttatactttttcatctgccaaaaccaaaaaccattttgatctccctgtggttatcaatataacgcacaatcacaagtgtatgaggacttagaaattaatcctttgtggtaggagttctgttgaatgatggaaatcttattactaccacaagactatttgttctggtaattggagacttcgggatttaggagatctccatgtctgtatttactctaccactgctaaagtgtgtggtcctgggtagtttacttgcttgcggaaaatgagaattgatggtgtccccaatgccccacctcacagagttactaaaaaatgtctgtaaagcatatttacctcttgggagataggcactatgtaaataaggtaaaatttctgttattacaattattcataataatattcttttcttatttctaagcctttctgggaaatcatttcagtccacaccaaccatattattcagggttcctgccatatgtgtggggtatcctactgatacacacgtattcaaagtttatgggtacaacaaagacatagtacatgtacataatatgtatgtgaatatagttaaatatatttcttcacaatattttaaactgtgaagaactttatcatacaggaaacttaaaacaagaggtgtcaaaagacccaaattaggtgcattttacttgtttatgatggcataaccattgctttaaaatgtttagacagtagaatattgaatttatgctctatttttgtttatttaagcaacacttaatgtaaaagtgcaacaggcaattgaatccaaatttcaacgacaaaaaaaaaaaacatgtattttagagttcatctttggcaaaatctttggttcagggtactagttgtttaaaagttgattcatattcttaccttgtgctgagaaaggttgcattgctgccccttatacacatgctgcagcttgatgttaaagaatttttattctttctgaagaactaattaatgtttaaagcaactgtttaatatgatggcatgtgtgtgtgtgcgtgcgtgtgtatgttctgagtccacttcttttttcctaaataacactacagggattttgtcatattagatttaatttataatttgaaaaatcatctagtgtgtgacctacaggcttagaaatggtatagtcaaagacattttatccacatttctaatagtggacttgattaagtagataagatcagcatctgtttatggtattaggagaaatagccaaagttgaggattttatgtatgttttcctgtttacctggaaaatagcaattaattggattttttggtaaagattgccttctgtataatgtttggattatataaaattgcaaaaatgataacagcccgctttactgtactaagcctgttactctcatgacgtgtgagcagaatgccttattttgtaatcttgtttaacttgttgctactgggacttgatttactgtggcactagttaagtaagttaaaaaaaagttaaaccctctcattattaaagaggaaaggcgatggtgatgtctgtagtacaatataaaccataattgtgatttaccttaagtaggtataactcttatgggatatacagtatagtttttgtgaatctttacatgatagcattatctttttataattttttttcctaagataaacaaatgcatagttttcttctatgggtgatagaaacagctttttgaagtaatgaaaacctcaaaagatcatgttgattcttaatttttgccttttgcataagcctctttataacatgtatctttaaaacaattaagtctttaggaatgtgtaaccagaactatgttagtattgcttataaaactttagttaggttcaatatatacatatatacatctctatataggtatatagatttgcattttgtcttgtaaaattttatttgaataaattcttcctgtaggtaatgggaaacaaaattaatagttcatatgtcactcatagcatttctatatttgaaagtagcccaatataaaacttttgattctaaaattaaaccagcagcctattacaagcaaaaaaaaaaaaaaaa

SEQ ID NO: 32 - protein, 579 aa, Homo sapiens
MEVNAGGVIAYISSSSSASSHASCHSEGSENSFQSSSSSVPSSPNSSNSDTNGNPKNGDLANIEGILKNDRIDCSMKTSKSSAPGMTKSHSGVTKFSGMVLLCKVCGDVASGFHYGVHACEGCKGFFRRSIQQNIQYKKCLKNENCSIMRMNRNRCQQCRFKKCLSVGMSRDAVRFGRIPKREKQRMLIEMQSAMKTMMNSQFSGHLQNDTLVEHHEQTALPAQEQLRPKPQLEQENIKSSSPPSSDFAKEEVIGMVTRAHKDTFMYNQEQQENSAESMQPKRGERIRKNMEQYNLNHDHCGNGLSSHFPCSESQQHLNGQFKGRNIMHYPNGHAICIANGHCMNFSNAYTQRVCDRVPIDGFSQNENKNSYLCNTGGRMHLVCPMSKSPYVDPHKSGHEIWEEFSMSFTPAVKEVVEFAKRIPGFRDLSQHDQVNLLKAGTFEVLMVRFASLFDAKERTVTFLSGKKYSVDDLHSMGAGDLLNSMFEFSEKLNALQLSDEEMSLFTAVVLVSADRSGIENVNSVEALQETLIRALRTLIMKNHPNEASIFTKLLLKLPDLRSLNNMHSEELLAFKVHP

SEQ ID NO: 33 - DNA, 1847 bp, Homo sapiens
  CDS (86)...(1657): ROR alpha (NR1F1) variant 1
ggtaccatagagttgctctgaaaacagaagatagagggagtctcggagctcgccatctccagcgatctctacattgggaaaaaacatggagtcagctccggcagcccccgaccccgccgccagcgagccaggcagcagcggcgcggacgcggccgccggctccagggagaccccgctgaaccaggaatccgcccgcaagagcgagccgcctgccccggtgcgcagacagagctattccagcaccagcagaggtatctcagtaacgaagaagacacatacatctcaaattgaaattattccatgcaagatctgtggagacaaatcatcaggaatccattatggtgtcattacatgtgaaggctgcaagggctttttcaggagaagtcagcaaagcaatgccacctactcctgtcctcgtcagaagaactgtttgattgatcgaaccagtagaaaccgctgccaacactgtcgattacagaaatgccttgccgtagggatgtctcgagatgctgtaaaatttggccgaatgtcaaaaaagcagagagacagcttgtatgcagaagtacagaaacaccggatgcagcagcagcagcgcgaccaccagcagcagcctggagaggctgagccgctgacgcccacctacaacatctcggccaacgggctgacggaacttcacgacgacctcagtaactacattgacgggcacacccctgaggggagtaaggcagactccgccgtcagcagcttctacctggacatacagccttccccagaccagtcaggtcttgatatcaatggaatcaaaccagaaccaatatgtgactacacaccagcatcaggcttctttccctactgttcgttcaccaacggcgagacttccccaactgtgtccatggcagaattagaacaccttgcacagaatatatctaaatcgcatctggaaacctgccaatacttgagagaagagctccagcagataacgtggcagacctttttacaggaagaaattgagaactatcaaaacaagcagcgggaggtgatgtggcaattgtgtgccatcaaaattacagaagctatacagtatgtggtggagtttgccaaacgcattgatggatttatggaactgtgtcaaaatgatcaaattgtgcttctaaaagcaggttctctagaggtggtgtttatcagaatgtgccgtgcctttgactctcagaacaacaccgtgtactttgatgggaagtatgccagccccgacgtcttcaaatccttaggttgtgaagactttattagctttgtgtttgaatttggaaagagtttatgttctatgcacctgactgaagatgaaattgcattattttctgcatttgtactgatgtcagcagatcgctcatggctgcaagaaaaggtaaaaattgaaaaactgcaacagaaaattcagctagctcttcaacacgtcctacagaagaatcaccgagaagatggaatactaacaaagttaatatgcaaggtgtctacattaagagccttatgtggacgacatacagaaaagctaatggcatttaaagcaatatacccagacattgtgcgacttcattttcctccattatacaaggagttgttcacttcagaatttgagccagcaatgcaaattgatgggtaaatgttatcacctaagcacttctagaatgtctgaagtacaaacatgaaaaacaaacaaaaaaattaaccgagacactttatatggccctgcacagacctggagcgccacacactgcacatcttttggtgatcggggtcaggcaaaggaggggaaacaatgaaaacaaataaagttgaacttgtttttctca

SEQ ID NO: 34 - protein, 523 aa, Homo sapiens
MESAPAAPDPAASEPGSSGADAAAGSRETPLNQESARKSEPPAPVRRQSYSSTSRGISVTKKTHTSQIEIIPCKICGDKSSGIHYGVITCEGCKGFFRRSQQSNATYSCPRQKNCLIDRTSRNRCQHCRLQKCLAVGMSRDAVKFGRMSKKQRDSLYAEVQKHRMQQQQRDHQQQPGEAEPLTPTYNISANGLTELHDDLSNYIDGHTPEGSKADSAVSSFYLDIQPSPDQSGLDINGIKPEPICDYTPASGFFPYCSFTNGETSPTVSMAELEHLAQNISKSHLETCQYLREELQQITWQTFLQEEIENYQNKQREVMWQLCAIKITEAIQYVVEFAKRIDGFMELCQNDQIVLLKAGSLEVVFIRMCRAFDSQNNTVYFDGKYASPDVFKSLGCEDFISFVFEFGKSLCSMHLTEDEIALFSAFVLMSADRSWLQEKVKIEKLQQKIQLALQHVLQKNHREDGILTKLICKVSTLRALCGRHTEKLMAFKAIYPDIVRLHFPPLYKELFTSEFEPAMQIDG

SEQ ID NO: 35 - DNA, 1687 bp, Homo sapiens
  CDS (91)...(1497): ROR alpha (NR1F1) variant 2
tgtggctcgggcggcggcggcgcggcggcggcagagggggctccggggtcggaccatccgctctccctgcgctctccgcaccgcgcttaaatgatgtattttgtgatcgcagcgatgaaagctcaaattgaaattattccatgcaagatctgtggagacaaatcatcaggaatccattatggtgtcattacatgtgaaggctgcaagggctttttcaggagaagtcagcaaagcaatgccacctactcctgtcctcgtcagaagaactgtttgattgatcgaaccagtagaaaccgctgccaacactgtcgattacagaaatgccttgccgtagggatgtctcgagatgctgtaaaatttggccgaatgtcaaaaaagcagagagacagcttgtatgcagaagtacagaaacaccggatgcagcagcagcagcgcgaccaccagcagcagcctggagaggctgagccgctgacgcccacctacaacatctcggccaacgggctgacggaacttcacgacgacctcagtaactacattgacgggcacacccctgaggggagtaaggcagactccgccgtcagcagcttctacctggacatacagccttccccagaccagtcaggtcttgatatcaatggaatcaaaccagaaccaatatgtgactacacaccagcatcaggcttctttccctactgttcgttcaccaacggcgagacttccccaactgtgtccatggcagaattagaacaccttgcacagaatatatctaaatcgcatctggaaacctgccaatacttgagagaagagctccagcagataacgtggcagacctttttacaggaagaaattgagaactatcaaaacaagcagcgggaggtgatgtggcaattgtgtgccatcaaaattacagaagctatacagtatgtggtggagtttgccaaacgcattgatggatttatggaactgtgtcaaaatgatcaaattgtgcttctaaaagcaggttctctagaggtggtgtttatcagaatgtgccgtgcctttgactctcagaacaacaccgtgtactttgatgggaagtatgccagccccgacgtcttcaaatccttaggttgtgaagactttattagctttgtgtttgaatttggaaagagtttatgttctatgcacctgactgaagatgaaattgcattattttctgcatttgtactgatgtcagcagatcgctcatggctgcaagaaaaggtaaaaattgaaaaactgcaacagaaaattcagctagctcttcaacacgtcctacagaagaatcaccgagaagatggaatactaacaaagttaatatgcaaggtgtctacattaagagccttatgtggacgacatacagaaaagctaatggcatttaaagcaatatacccagacattgtgcgacttcattttcctccattatacaaggagttgttcacttcagaatttgagccagcaatgcaaattgatgggtaaatgttatcacctaagcacttctagaatgtctgaagtacaaacatgaaaaacaaacaaaaaaattaaccgagacactttatatggccctgcacagacctggagcgccacacactgcacatcttttggtgatcggggtcaggcaaaggaggggaaacaatgaaaacaaataaagttgaacttgtttttctca

SEQ ID NO: 36 - protein, 468 aa, Homo sapiens
MMYFVIAAMKAQIEIIPCKICGDKSSGIHYGVITCEGCKGFFRRSQQSNATYSCPRQKNCLIDRTSRNRCQHCRLQKCLAVGMSRDAVKFGRMSKKQRDSLYAEVQKHRMQQQQRDHQQQPGEAEPLTPTYNISANGLTELHDDLSNYIDGHTPEGSKADSAVSSFYLDIQPSPDQSGLDINGIKPEPICDYTPASGFFPYCSFTNGETSPTVSMAELEHLAQNISKSHLETCQYLREELQQITWQTFLQEEIENYQNKQREVMWQLCAIKITEAIQYVVEFAKRIDGFMELCQNDQIVLLKAGSLEVVFIRMCRAFDSQNNTVYFDGKYASPDVFKSLGCEDFISFVFEFGKSLCSMHLTEDEIALFSAFVLMSADRSWLQEKVKIEKLQQKIQLALQHVLQKNHREDGILTKLICKVSTLRALCGRHTEKLMAFKAIYPDIVRLHFPPLYKELFTSEFEPAMQIDG

SEQ ID NO: 37 - DNA, 2020 bp, Homo sapiens
  CDS (160)...(1830): ROR alpha (NR1F1) variant 3
gcagattcacagggcctctgagcattatcccccatactcctccccatcattctccacccagctgttggagccatctgtctgatcaccttggactccatagtacactggggcaaagcacagccccagtttctggaggcagatgggtaaccaggaaaaggcatgaatgagggggccccaggagacagtgacttagagactgaggcaagagtgccgtggtcaatcatgggtcattgtcttcgaactggacaggccagaatgtctgccacacccacacctgcaggtgaaggagccagaagggatgaactttttgggattctccaaatactccatcagtgtatcctgtcttcaggtgatgcttttgttcttactggcgtctgttgttcctggaggcagaatggcaagccaccatattcacaaaaggaagataaggaagtacaaactggatacatgaatgctcaaattgaaattattccatgcaagatctgtggagacaaatcatcaggaatccattatggtgtcattacatgtgaaggctgcaagggctttttcaggagaagtcagcaaagcaatgccacctactcctgtcctcgtcagaagaactgtttgattgatcgaaccagtagaaaccgctgccaacactgtcgattacagaaatgccttgccgtagggatgtctcgagatgctgtaaaatttggccgaatgtcaaaaaagcagagagacagcttgtatgcagaagtacagaaacaccggatgcagcagcagcagcgcgaccaccagcagcagcctggagaggctgagccgctgacgcccacctacaacatctcggccaacgggctgacggaacttcacgacgacctcagtaactacattgacgggcacacccctgaggggagtaaggcagactccgccgtcagcagcttctacctggacatacagccttccccagaccagtcaggtcttgatatcaatggaatcaaaccagaaccaatatgtgactacacaccagcatcaggcttctttccctactgttcgttcaccaacggcgagacttccccaactgtgtccatggcagaattagaacaccttgcacagaatatatctaaatcgcatctggaaacctgccaatacttgagagaagagctccagcagataacgtggcagacctttttacaggaagaaattgagaactatcaaaacaagcagcgggaggtgatgtggcaattgtgtgccatcaaaattacagaagctatacagtatgtggtggagtttgccaaacgcattgatggatttatggaactgtgtcaaaatgatcaaattgtgcttctaaaagcaggttctctagaggtggtgtttatcagaatgtgccgtgcctttgactctcagaacaacaccgtgtactttgatgggaagtatgccagccccgacgtcttcaaatccttaggttgtgaagactttattagctttgtgtttgaatttggaaagagtttatgttctatgcacctgactgaagatgaaattgcattattttctgcatttgtactgatgtcagcagatcgctcatggctgcaagaaaaggtaaaaattgaaaaactgcaacagaaaattcagctagctcttcaacacgtcctacagaagaatcaccgagaagatggaatactaacaaagttaatatgcaaggtgtctacattaagagccttatgtggacgacatacagaaaagctaatggcatttaaagcaatatacccagacattgtgcgacttcattttcctccattatacaaggagttgttcacttcagaatttgagccagcaatgcaaattgatgggtaaatgttatcacctaagcacttctagaatgtctgaagtacaaacatgaaaaacaaacaaaaaaattaaccgagacactttatatggccctgcacagacctggagcgccacacactgcacatcttttggtgatcggggtcaggcaaaggaggggaaacaatgaaaacaaataaagttgaacttgtttttctca

SEQ ID NO: 38 - protein, 556 aa, Homo sapiens
MNEGAPGDSDLETEARVPWSIMGHCLRTGQARMSATPTPAGEGARRDELFGILQILHQCILSSGDAFVLTGVCCSWRQNGKPPYSQKEDKEVQTGYMNAQIEIIPCKICGDKSSGIHYGVITCEGCKGFFRRSQQSNATYSCPRQKNCLIDRTSRNRCQHCRLQKCLAVGMSRDAVKFGRMSKKQRDSLYAEVQKHRMQQQQRDHQQQPGEAEPLTPTYNISANGLTELHDDLSNYIDGHTPEGSKADSAVSSFYLDIQPSPDQSGLDINGIKPEPICDYTPASGFFPYCSFTNGETSPTVSMAELEHLAQNISKSHLETCQYLREELQQITWQTFLQEEIENYQNKQREVMWQLCAIKITEAIQYVVEFAKRIDGFMELCQNDQIVLLKAGSLEVVFIRMCRAFDSQNNTVYFDGKYASPDVFKSLGCEDFISFVFEFGKSLCSMHLTEDEIALFSAFVLMSADRSWLQEKVKIEKLQQKIQLALQHVLQKNHREDGILTKLICKVSTLRALCGRHTEKLMAFKAIYPDIVRLHFPPLYKELFTSEFEPAMQIDG

SEQ ID NO: 39 - DNA, 862 bp, Homo sapiens
  CDS (125)...(511): ROR alpha (NR1F1) variant 4
gtaataaccgcgcgcggcgctcggcgttcccgcaaggtcgctttgcagagcgggagcgcgcttaagtaactagtccgtagttcgagggtgcgccgtgtccttttgcgttggtaccagcggcgacatgacggggtacactccggatgagaaactgcggctgcagcagctgcgagagctgagaaggcgatggctgaaggaccaggagctgagccctcgggagccggtgctgcccccacagaagatggggcctatggagaaattctggaataaatttttggagaataaatccccttggaggaaaatggtccatggggtatacaaaaagagtatctttgttttcactcatgtacttgtacctgtctggattattcattattacatgaagtatcatgtttctgaaaaaccatatggcatagttgaaaagaagtccagaatattccctggtgatacaattctggagactggagaagtaattccaccaatgaaagaatttcctgatcaacatcattaaagattatgtaaaaagttaaaaggcttatgagcctaagtttgttcctatattaccatatttactgaattttctggaaaagtaactttaataaagtttaatctcagaaattgtcatatctgttttcaagcattgtacaatttgagactgagtaatttaacaataagtaaaaagtggacatgctaaacaaatatgagagactacctactttttctggtcattcttgacttggaaaacggtatggaaaagtatttagttacatgtttgtttgtttttttcttacacagtacttacactaatttggtatcagggtatgcaacagtgaaatatcacaataaacaaatgtaagaacag

SEQ ID NO: 40 - protein, 128 aa, Homo sapiens
MTGYTPDEKLRLQQLRELRRRWLKDQELSPREPVLPPQKMGPMEKFWNKFLENKSPWRKMVHGVYKKSIFVFTHVLVPVWIIHYYMKYHVSEKPYGIVEKKSRIFPGDTILETGEVIPPMKEFPDQHH

SEQ ID NO: 41 - DNA, 3243 bp, Homo sapiens
  CDS (595)...(1974): ROR beta (NR1F2)
gaacagtgaaaattcacattgtggatccgctaacaggcacagatgtcatgtgaaaacgcacatgctctgccatccacaccgcctttctttcttttctttctgtttccttttttcccccttgttccttctccctcttctttgtaactaacaaaaccaccaccaactcctcctcctgctgctgcccttcctcctcctcctcagtccaagtgatcacaaaagaaatcttctgagccggaggcggtggcattttttaaaaagcaagcacattggagagaaagaaaaagaaaaacaaaaccaaaacaaaacccaggcaccagacagccagaacatttttttttcacccttcctgaaaacaaacaaacaaacaaacaatcatcaaaacagtcaccaccaacatcaaaactgttaacatagcggcggcggcggcaaacgtcaccctgcagccacggcgtccgcctaaagggatggttttctcggcagagcagctcttcgccgaccaccttcttcactcgtgctgagcgggatttttgggctctccggggttcgggctgggagcagcttcatgactacgcggagcgggagagcggccacaccatgcgagcacaaattgaagtgataccatgcaaaatttgtggcgataagtcctctgggatccactacggagtcatcacatgtgaaggctgcaagggattctttaggaggagccagcagaacaatgcttcttattcctgcccaaggcagagaaactgtttaattgacagaacgaacagaaaccgttgccaacactgccgactgcagaagtgtcttgccctaggaatgtcaagagatgctgtgaagtttgggaggatgtccaagaagcaaagggacagcctgtatgctgaggtgcagaagcaccagcagcggctgcaggaacagcggcagcagcagagtggggaggcagaagcccttgccagggtgtacagcagcagcattagcaacggcctgagcaacctgaacaacgagaccagcggcacttatgccaacgggcacgtcattgacctgcccaagtctgagggttattacaacgtcgattccggtcagccgtcccctgatcagtcaggacttgacatgactggaatcaaacagataaagcaagaacctatctatgacctcacatccgtacccaacttgtttacctatagctctttcaacaatgggcagttagcaccagggataaccatgactgaaatcgaccgaattgcacagaacatcattaagtcccatttggagacatgtcaatacaccatggaagagctgcaccagctggcgtggcagacccacacctatgaagaaattaaagcatatcaaagcaagtccagggaagcactgtggcaacaatgtgccatccagatcactcacgccatccaatacgtggtggagtttgcaaagcggataacaggcttcatggagctctgtcaaaatgatcaaattctacttctgaagtcaggttgcttggaagtggttttagtgagaatgtgccgtgccttcaacccattaaacaacactgttctgtttgaaggaaaatatggaggaatgcaaatgttcaaagccttaggttctgatgacctagtgaatgaagcatttgactttgcaaagaatttgtgttccttgcagctgaccgaggaggagatcgctttgttctcatctgctgttctgatatctccagaccgagcctggcttatagaaccaaggaaagtccagaagcttcaggaaaaaatttattttgcacttcaacatgtgattcagaagaatcacctggatgatgagaccttggcaaagttaatagccaagataccaaccatcacggcagtttgcaacttgcacggggagaagctgcaggtatttaagcaatctcatccagagatagtgaatacactgtttcctccgttatacaaggagctctttaatcctgactgtgccaccggctgcaaatgaaggggacaagagaactgtctcatagtcatggaatgcatcaccattaagacaaaagcaatgtgttcatgaagacttaagaaaaatgtcactactgcaacattaggaatgtcctgcacttaatagaattatttttcaccgctacagtttgaagaatgtaaatatgcacctgagtggggctcttttatttgtttgtttgtttttgaaatgaccataaatatacaaatataggacactgggtgttatcctttttttaattttattcgggtatgttttgggagacaactgtttatagaattttattgtagatatatacaagaaaagagcggtactttacatgattacttttcctgttgattgttcaaatataatttaagaaaattccacttaataggcttacctatttctatgtttttaggtagttgatgcatgtgtaaatttgtagctgtcttggaaagtactgtgcatgtatgtaataagtatataatatgtgagaatattatatatgactattacttatacatgcacatgcactgtggcttaaataccatacctactagcaatggaggttcagtcaggctctcttctatgatttaccttctgtgttatatgttacctttatgttagacaatcaggattttgttttcccagccagagttttcatctatagtcaatggcaggacggtaccaactcagagttaagtctacaaaggaataaacataatgtgtggcctctatatacaaactctatttctgtcaatgacatcaaagccttgtcaagatggttcatattgggaaggagacagtattttaagccattttcctgtttcaagaattaggccacagataacattgcaaggtccaagacttttttgaccaaacagtagatattttctatttttcaccagaacacataaaaacactttttttcttttggatttctggttgtgaaacaagcttgatttcagtgcttattgtgtcttcaactgaaaaatacaatctgtggattatgactaccagcaatttttttctaggaaagttaaaagaataaatcagaacccagggcaacaatgccatttcatgtaaacattttctctctcaccatgttttggcaagaaaaggtagaaagagaagacccagagtgaagaagtaattctttatattcctttctttaatgtatttgttaggaaaagtggcaataaagggggaggcatattataaaatgctataatataaaaatgtagcaaaaacttgacagactagaaaaaaaaa

SEQ ID NO: 42 - protein, 459 aa, Homo sapiens
MRAQIEVIPCKICGDKSSGIHYGVITCEGCKGFFRRSQQNNASYSCPRQRNCLIDRTNRNRCQHCRLQKCLALGMSRDAVKFGRMSKKQRDSLYAEVQKHQQRLQEQRQQQSGEAEALARVYSSSISNGLSNLNNETSGTYANGHVIDLPKSEGYYNVDSGQPSPDQSGLDMTGIKQIKQEPIYDLTSVPNLFTYSSFNNGQLAPGITMTEIDRIAQNIIKSHLETCQYTMEELHQLAWQTHTYEEIKAYQSKSREALWQQCAIQITHAIQYVVEFAKRITGFMELCQNDQILLLKSGCLEVVLVRMCRAFNPLNNTVLFEGKYGGMQMFKALGSDDLVNEAFDFAKNLCSLQLTEEEIALFSSAVLISPDRAWLIEPRKVQKLQEKIYFALQHVIQKNHLDDETLAKLIAKIPTITAVCNLHGEKLQVFKQSHPEIVNTLFPPLYKELFNPDCATGCK

SEQ ID NO: 43 - DNA, 1821 bp, Homo sapiens
  CDS (70)...(1626): ROR gamma (NR1F3)
cccctgggccctgctccctgccctcctgggcagccagggcagccaggacggcaccaagggagctgccccatggacagggccccacagagacagcaccgagcctcacgggagctgctggctgcaaagaagacccacacctcacaaattgaagtgatcccttgcaaaatctgtggggacaagtcgtctgggatccactacggggttatcacctgtgaggggtgcaagggcttcttccgccggagccagcgctgtaacgcggcctactcctgcacccgtcagcagaactgccccatcgaccgcaccagccgaaaccgatgccagcactgccgcctgcagaaatgcctggcgctgggcatgtcccgagatgctgtcaagttcggccgcatgtccaagaagcagagggacagcctgcatgcagaagtgcagaaacagctgcagcagcggcaacagcagcaacaggaaccagtggtcaagacccctccagcaggggcccaaggagcagataccctcacctacaccttggggctcccagacgggcagctgcccctgggctcctcgcctgacctgcctgaggcttctgcctgtccccctggcctcctgaaagcctcaggctctgggccctcatattccaacaacttggccaaggcagggctcaatggggcctcatgccaccttgaatacagccctgagcggggcaaggctgagggcagagagagcttctatagcacaggcagccagctgacccctgaccgatgtggacttcgttttgaggaacacaggcatcctgggcttggggaactgggacagggcccagacagctacggcagccccagtttccgcagcacaccggaggcaccctatgcctccctgacagagatagagcacctggtgcagagcgtctgcaagtcctacagggagacatgccagctgcggctggaggacctgctgcggcagcgctccaacatcttctcccgggaggaagtgactggctaccagaggaagtccatgtgggagatgtgggaacggtgtgcccaccacctcaccgaggccattcagtacgtggtggagttcgccaagaggctctcaggctttatggagctctgccagaatgaccagattgtgcttctcaaagcaggagcaatggaagtggtgctggttaggatgtgccgggcctacaatgctgacaaccgcacggtcttttttgaaggcaaatacggtggcatggagctgttccgagccttgggctgcagcgagctcatcagctccatctttgacttctcccactccctaagtgccttgcacttttccgaggatgagattgccctctacacagcccttgttctcatcaatgcccatcggccagggctccaagagaaaaggaaagtagaacagctgcagtacaatctggagctggcctttcatcatcatctctgcaagactcatcgccaaagcatcctggcaaagctgccacccaaggggaagcttcggagcctgtgtagccagcatgtggaaaggctgcagatcttccagcacctccaccccatcgtggtccaagccgctttccctccactctacaaggagctcttcagcactgaaaccgagtcacctgtggggctgtccaagtgacctggaagagggactccttgcctctccctatggcctgctggcccacctccctggaccccgttccaccctcacccttttcctttcccatgaaccctggagggtggtccccaccagctctttggaagtgagcagatgctgcggctggctttctgtcagcaggccggcctggcagtgggacaatcgccagagggtggg

SEQ ID NO: 44 - protein, 518 aa, Homo sapiens
MDRAPQRQHRASRELLAAKKTHTSQIEVIPCKICGDKSSGIHYGVITCEGCKGFFRRSQRCNAAYSCTRQQNCPIDRTSRNRCQHCRLQKCLALGMSRDAVKFGRMSKKQRDSLHAEVQKQLQQRQQQQQEPVVKTPPAGAQGADTLTYTLGLPDGQLPLGSSPDLPEASACPPGLLKASGSGPSYSNNLAKAGLNGASCHLEYSPERGKAEGRESFYSTGSQLTPDRCGLRFEEHRHPGLGELGQGPDSYGSPSFRSTPEAPYASLTEIEHLVQSVCKSYRETCQLRLEDLLRQRSNIFSREEVTGYQRKSMWEMWERCAHHLTEAIQYVVEFAKRLSGFMELCQNDQIVLLKAGAMEVVLVRMCRAYNADNRTVFFEGKYGGMELFRALGCSELISSIFDFSHSLSALHFSEDEIALYTALVLINAHRPGLQEKRKVEQLQYNLELAFHHHLCKTHRQSILAKLPPKGKLRSLCSQHVERLQIFQHLHPIVVQAAFPPLYKELFSTETESPVGLSK

SEQ ID NO: 45 - DNA, 2010 bp, Homo sapiens
  CDS (245)...(1630): LXR beta (NR1H2)
caagaagtggcgaagttacctttgagggtatttgagtagcggcggtgtgtcaggggctaaagaggaggacgaagaaaagcagagcaagggaacccagggcaacaggagtagttcactccgcgagaggccgtccacgagacccccgcgcgcaggcatgagccccgccccccacgcatgagccccgccccccgctgttgcttggagaggggcgggacctggagagaggctgctccgtgaccccaccatgtcctctcctaccacgagttccctggatacccccctgcctggaaatggcccccctcagcctggcgccccttcttcttcacccactgtaaaggaggagggtccggagccgtggcccgggggtccggaccctgatgtcccaggcactgatgaggccagctcagcctgcagcacagactgggtcatcccagatcccgaagaggaaccagagcgcaagcgaaagaagggcccagccccgaagatgctgggccacgagctttgccgtgtctgtggggacaaggcctccggcttccactacaacgtgctcagctgcgaaggctgcaagggcttcttccggcgcagtgtggtccgtggtggggccaggcgctatgcctgccggggtggcggaacctgccagatggacgctttcatgcggcgcaagtgccagcagtgccggctgcgcaagtgcaaggaggcagggatgagggagcagtgcgtcctttctgaagaacagatccggaagaagaagattcggaaacagcagcagcaggagtcacagtcacagtcgcagtcacctgtggggccgcagggcagcagcagctcagcctctgggcctggggcttcccctggtggatctgaggcaggcagccagggctccggggaaggcgagggtgtccagctaacagcggctcaagaactaatgatccagcagttggtggcggcccaactgcagtgcaacaaacgctccttctccgaccagcccaaagtcacgccctggcccctgggcgcagacccccagtcccgagatgcccgccagcaacgctttgcccacttcacggagctggccatcatctcagtccaggagatcgtggacttcgctaagcaagtgcctggtttcctgcagctgggccgggaggaccagatcgccctcctgaaggcatccactatcgagatcatgctgctagagacagccaggcgctacaaccacgagacagagtgtatcaccttcttgaaggacttcacctacagcaaggacgacttccaccgtgcaggcctgcaggtggagttcatcaaccccatcttcgagttctcgcgggccatgcggcggctgggcctggacgacgctgagtacgccctgctcatcgccatcaacatcttctcggccgaccggcccaacgtgcaggagccgggccgcgtggaggcgttgcagcagccctacgtggaggcgctgctgtcctacacgcgcatcaagaggccgcaggaccagctgcgcttcccgcgcatgctcatgaagctggtgagcctgcgcacgctgagctctgtgcactcggagcaggtcttcgccttgcggctccaggacaagaagctgccgcctctgctgtcggagatctgggacgtccacgagtgaggggctggccacccagccccacagccttgcctgaccaccctccagcagatagacgccggcaccccttcctcttcctagggtggaaggggccctgggcgagcctgtagacctatcggctctcatcccttgggataagccccagtccaggtccaggaggctccctccctgcccagcgagtcttccagaaggggtgaaagggttgcaggtcccgaccactgacccttcccggctgccctccctccccagcttacacctcaagcccagcacgcagcgtaccttgaacagagggaggggaggacccatggctctccccccctagcccgggagaccaggggccttcctcttcctctgcttttatttaataaaaataaaaacagaaa

SEQ ID NO: 46 - protein, 461 aa, Homo sapiens
MSSPTTSSLDTPLPGNGPPQPGAPSSSPTVKEEGPEPWPGGPDPDVPGTDEASSACSTDWVIPDPEEEPERKRKKGPAPKMLGHELCRVCGDKASGFHYNVLSCEGCKGFFRRSVVRGGARRYACRGGGTCQMDAFMRRKCQQCRLRKCKEAGMREQCVLSEEQIRKKKIRKQQQQESQSQSQSPVGPQGSSSSASGPGASPGGSEAGSQGSGEGEGVQLTAAQELMIQQLVAAQLQCNKRSFSDQPKVTPWPLGADPQSRDARQQRFAHFTELAIISVQEIVDFAKQVPGFLQLGREDQIALLKASTIEIMLLETARRYNHETECITFLKDFTYSKDDFHRAGLQVEFINPIFEFSRAMRRLGLDDAEYALLIAINIFSADRPNVQEPGRVEALQQPYVEALLSYTRIKRPQDQLRFPRMLMKLVSLRTLSSVHSEQVFALRLQDKKLPPLLSEIWDVHE

SEQ ID NO: 47 - DNA, 1528 bp, Homo sapiens
  CDS (36)...(1379): LXR alpha (NR1H3)
cagtgccttggtaatgaccagggctccagaaagagatgtccttgtggctgggggcccctgtgcctgacattcctcctgactctgcggtggagctgtggaagccaggcgcacaggatgcaagcagccaggcccagggaggcagcagctgcatcctcagagaggaagccaggatgccccactctgctgggggtactgcaggggtggggctggaggctgcagagcccacagccctgctcaccagggcagagcccccttcagaacccacagagatccgtccacaaaagcggaaaaaggggccagcccccaaaatgctggggaacgagctatgcagcgtgtgtggggacaaggcctcgggcttccactacaatgttctgagctgcgagggctgcaagggattcttccgccgcagcgtcatcaagggagcgcactacatctgccacagtggcggccactgccccatggacacctacatgcgtcgcaagtgccaggagtgtcggcttcgcaaatgccgtcaggctggcatgcgggaggagtgtgtcctgtcagaagaacagatccgcctgaagaaactgaagcggcaagaggaggaacaggctcatgccacatccttgccccccaggcgttcctcacccccccaaatcctgccccagctcagcccggaacaactgggcatgatcgagaagctcgtcgctgcccagcaacagtgtaaccggcgctccttttctgaccggcttcgagtcacgccttggcccatggcaccagatccccatagccgggaggcccgtcagcagcgctttgcccacttcactgagctggccatcgtctctgtgcaggagatagttgactttgctaaacagctacccggcttcctgcagctcagccgggaggaccagattgccctgctgaagacctctgcgatcgaggtgatgcttctggagacatctcggaggtacaaccctgggagtgagagtatcaccttcctcaaggatttcagttataaccgggaagactttgccaaagcagggctgcaagtggaattcatcaaccccatcttcgagttctccagggccatgaatgagctgcaactcaatgatgccgagtttgccttgctcattgctatcagcatcttctctgcagaccggcccaacgtgcaggaccagctccaggtggagaggctgcagcacacatatgtggaagccctgcatgcctacgtctccatccaccatccccatgaccgactgatgttcccacggatgctaatgaaactggtgagcctccggaccctgagcagcgtccactcagagcaagtgtttgcactgcgtctgcaggacaaaaagctcccaccgctgctctctgagatctgggatgtgcacgaatgactgttctgtccccatattttctgttttcttggccggatggctgaggcctggtggctgcctcctagaagtggaacagactgagaagggcaaacattcctgggagctgggcaaggagatcctcccgtggcattaaaagagagtcaaagggt

SEQ ID NO: 48 - protein, 447 aa, Homo sapiens
MSLWLGAPVPDIPPDSAVELWKPGAQDASSQAQGGSSCILREEARMPHSAGGTAGVGLEAAEPTALLTRAEPPSEPTEIRPQKRKKGPAPKMLGNELCSVCGDKASGFHYNVLSCEGCKGFFRRSVIKGAHYICHSGGHCPMDTYMRRKCQECRLRKCRQAGMREECVLSEEQIRLKKLKRQEEEQAHATSLPPRRSSPPQILPQLSPEQLGMIEKLVAAQQQCNRRSFSDRLRVTPWPMAPDPHSREARQQRFAHFTELAIVSVQEIVDFAKQLPGFLQLSREDQIALLKTSAIEVMLLETSRRYNPGSESITFLKDFSYNREDFAKAGLQVEFINPIFEFSRAMNELQLNDAEFALLIAISIFSADRPNVQDQLQVERLQHTYVEALHAYVSIHHPHDRLMFPRMLMKLVSLRTLSSVHSEQVFALRLQDKKLPPLLSEIWDVHE

SEQ ID NO: 49 - DNA, 2218 bp, Homo sapiens
  CDS (354)...(1772): FXR (NR1H4)
acgagactctctcctcctcctcacctcattgtctccccgacttatcctaatgcgaaattggattctgagcatttgtagcaaaatcgctgggatctggagaggaagactcagtccagaatcctcccagggccttgaaagtccatctctgacccaaaacaatccaaggaggtagaagacatcgtagaaggagtgaaagaagaaaagaagacttagaaacatagctcaaagtgaacactgcttctcttagtttcctggatttcttctggacatttcctcaagatgaaacttcagacactttggagttttttttgaagaccaccataaagaaagtgcatttcaattgaaaaatttggatgggatcaaaaatgaatctcattgaacattcccatttacctaccacagatgaattttctttttctgaaaatttatttggtgttttaacagaacaagtggcaggtcctctgggacagaacctggaagtggaaccatactcgcaatacagcaatgttcagtttccccaagttcaaccacagatttcctcgtcatcctattattccaacctgggtttctacccccagcagcctgaagagtggtactctcctggaatatatgaactcaggcgtatgccagctgagactctctaccagggagaaactgaggtagcagagatgcctgtaacaaagaagccccgcatgggcgcgtcagcagggaggatcaaaggggatgagctgtgtgttgtttgtggagacagagcctctggataccactataatgcactgacctgtgaggggtgtaaaggtttcttcaggagaagcattaccaaaaacgctgtgtacaagtgtaaaaacgggggcaactgtgtgatggatatgtacatgcgaagaaagtgtcaagagtgtcgactaaggaaatgcaaagagatgggaatgttggctgaatgcttgttaactgaaattcagtgtaaatctaagcgactgagaaaaaatgtgaagcagcatgcagatcagaccgtgaatgaagacagtgaaggtcgtgacttgcgacaagtgacctcgacaacaaagtcatgcagggagaaaactgaactcaccccagatcaacagactcttctacattttattatggattcatataacaaacagaggatgcctcaggaaataacaaataaaattttaaaagaagaattcagtgcagaagaaaattttctcattttgacggaaatggcaaccaatcatgtacaggttcttgtagaattcacaaaaaagctaccaggatttcagactttggaccatgaagaccagattgctttgctgaaagggtctgcggttgaagctatgttccttcgttcagctgagattttcaataagaaacttccgtctgggcattctgacctattggaagaaagaattcgaaatagtggtatctctgatgaatatataacacctatgtttagtttttataaaagtattggggaactgaaaatgactcaagaggagtatgctctgcttacagcaattgttatcctgtctccagatagacaatacataaaggatagagaggcagtagagaagcttcaggagccacttcttgatgtgctacaaaagttgtgtaagattcaccagcctgaaaatcctcaacactttgcctgtctcctgggtcgcctgactgaattacggacattcaatcatcaccacgctgagatgctgatgtcatggagagtaaacgaccacaagtttaccccacttctctgtgaaatctgggacgtgcagtgatggggattacaggggaggggtctagctcctttttctctctcatattaatctgatgtataactttcctttatttcacttgtacccagtttcactcaagaaatcttgatgaatatttatgttgtaattacatgtgtaacttccacaactgtaaatattgggctagatagaacaactttctctacattgtgttttaaaaggctccagggaatcctgcattctaattggcaagccctgtttgcctaattaaattgattgttacttcaattctatctgttgaactagggaaaatctcattttgctcatcttaccatattgcatatattttattaaagagttgtattcaatcttggcaataaagcaaacataatggcaacagaaaaaaaaaaaaaaaaaaaaaaaaaaaaaaaaaaaaaaaaaaaaaaaaaaaaaaaaaaaaaaaaaaaaaa

SEQ ID NO: 50 - protein, 472 aa, Homo sapiens
MGSKMNLIEHSHLPTTDEFSFSENLFGVLTEQVAGPLGQNLEVEPYSQYSNVQFPQVQPQISSSSYYSNLGFYPQQPEEWYSPGIYELRRMPAETLYQGETEVAEMPVTKKPRMGASAGRIKGDELCVVCGDRASGYHYNALTCEGCKGFFRRSITKNAVYKCKNGGNCVMDMYMRRKCQECRLRKCKEMGMLAECLLTEIQCKSKRLRKNVKQHADQTVNEDSEGRDLRQVTSTTKSCREKTELTPDQQTLLHFIMDSYNKQRMPQEITNKILKEEFSAEENFLILTEMATNHVQVLVEFTKKLPGFQTLDHEDQIALLKGSAVEAMFLRSAEIFNKKLPSGHSDLLEERIRNSGISDEYITPMFSFYKSIGELKMTQEEYALLTAIVILSPDRQYIKDREAVEKLQEPLLDVLQKLCKIHQPENPQHFACLLGRLTELRTFNHHHAEMLMSWRVNDHKFTPLLCEIWDVQ

SEQ ID NO: 51 - DNA, 4604 bp, Homo sapiens
  CDS (116)...(1399): VDR (NR1I1)
ggaacagcttgtccacccgccggccggaccagaagcctttgggtctgaagtgtctgtgagacctcacagaagagcacccctgggctccacttacctgccccctgctccttcagggatggaggcaatggcggccagcacttccctgcctgaccctggagactttgaccggaacgtgccccggatctgtggggtgtgtggagaccgagccactggctttcacttcaatgctatgacctgtgaaggctgcaaaggcttcttcaggcgaagcatgaagcggaaggcactattcacctgccccttcaacggggactgccgcatcaccaaggacaaccgacgccactgccaggcctgccggctcaaacgctgtgtggacatcggcatgatgaaggagttcattctgacagatgaggaagtgcagaggaagcgggagatgatcctgaagcggaaggaggaggaggccttgaaggacagtctgcggcccaagctgtctgaggagcagcagcgcatcattgccatactgctggacgcccaccataagacctacgaccccacctactccgacttctgccagttccggcctccagttcgtgtgaatgatggtggagggagccatccttccaggcccaactccagacacactcccagcttctctggggactcctcctcctcctgctcagatcactgtatcacctcttcagacatgatggactcgtccagcttctccaatctggatctgagtgaagaagattcagatgacccttctgtgaccctagagctgtcccagctctccatgctgccccacctggctgacctggtcagttacagcatccaaaaggtcattggctttgctaagatgataccaggattcagagacctcacctctgaggaccagatcgtactgctgaagtcaagtgccattgaggtcatcatgttgcgctccaatgagtccttcaccatggacgacatgtcctggacctgtggcaaccaagactacaagtaccgcgtcagtgacgtgaccaaagccggacacagcctggagctgattgagcccctcatcaagttccaggtgggactgaagaagctgaacttgcatgaggaggagcatgtcctgctcatggccatctgcatcgtctccccagatcgtcctggggtgcaggacgccgcgctgattgaggccatccaggaccgcctgtccaacacactgcagacgtacatccgctgccgccacccgcccccgggcagccacctgctctatgccaagatgatccagaagctagccgacctgcgcagcctcaatgaggagcactccaagcagtaccgctgcctctccttccagcctgagtgcagcatgaagctaacgccccttgtgctcgaagtgtttggcaatgagatctcctgactaggacagcctgtgcggtgcctgggtggggctgctcctccagggccacgtgccaggcccggggctggcggctactcagcagccctcctcacccgtctggggttcagcccctcctctgccacctcccctatccacccagcccattctctctcctgtccaacctaacccctttcctgcgggcttttccccggtcccttgagacctcagccatgaggagttgctgtttgtttgacaaagaaacccaagtgggggcagagggcagaggctggaggcaggccttgcccagagatgcctccaccgctgcctaagtggctgctgactgatgttgagggaacagacaggagaaatgcatccattcctcagggacagagacacctgcacctccccccactgcaggccccgcttgtccagcgcctagtggggtctccctctcctgccttactcacgataaataatcggcccacagctcccaccccacccccttcagtgcccaccaacatcccattgccctggttatattctcacgggcagtagctgtggtgaggtgggttttcttcccatcactggagcaccaggcacgaacccacctgctgagagacccaaggaggaaaaacagacaaaaacagcctcacagaagaatatgacagctgtccctgtcaccaagctcacagttcctcgccctgggtctaaggggttggttgaggtggaagccctccttccacggatccatgtagcaggactgaattgtccccagtttgcagaaaagcacctgccgacctcgtcctccccctgccagtgccttacctcctgcccaggagagccagccctccctgtcctcctcggatcaccgagagtagccgagagcctgctcccccaccccctccccaggggagagggtctggagaagcagtgagccgcatcttctccatctggcagggtgggatggaggagaagaattttcagaccccagcggctgagtcatgatctccctgccgcctcaatgtggttgcaaggccgctgttcaccacagggctaagagctaggctgccgcaccccagagtgtgggaagggagagcggggcagtctcgggtggctagtcagagagagtgtttgggggttccgtgatgtagggtaaggtgccttcttattctcactccaccacccaaaagtcaaaaggtgcctgtgaggcaggggcggagtgatacaacttcaagtgcatgctctctgcaggtcgagcccagcccagctggtgggaagcgtctgtccgtttactccaaggtgggtctttgtgagagtgagctgtaggtgtgcgggaccggtacagaaaggcgttcttcgaggtggatcacagaggcttcttcagatcaatgcttgagtttggaatcggccgcattccctgagtcaccaggaatgttaaagtcagtgggaacgtgactgccccaactcctggaagctgtgtccttgcacctgcatccgtagttccctgaaaacccagagaggaatcagacttcacactgcaagagccttggtgtccacctggccccatgtctctcagaattcttcaggtggaaaaacatctgaaagccacgttccttactgcagaatagcatatatatcgcttaatcttaaatttattagatatgagttgttttcagactcagactccatttgtattatagtctaatatacagggtagcaggtaccactgatttggagatatttatggggggagaacttacattgtgaaacttctgtacattaattattattgctgttgttattttacaagggtctagggagagacccttgtttgattttagctgcagaactgtattggtccagcttgctcttcagtgggagaaaaacacttgtaagttgctaaacgagtcaatcccctcattcaggaaaactgacagaggagggcgtgactcacccaagccatatataactagctagaagtgggccaggacaggccgggcgcggtggctcacgcctgtaatcccagcagtttgggaggtcgaggtaggtggatcacctgaggtcgggagttcgagaccaacctgaccaacatggagaaaccctgtctctattaaaaatacaaaaaaaaaaaaaaaaaaaaatagccgggcatggtggcgcaagcctgtaatcccagctactcaggaggctgaggcagaagaattgaacccaggaggtggaggttgcagtgagctgagatcgtgccgttactctccaacctggacaacaagagcgaaactccgtcttagaagtggaccaggacaggaccagattttggagtcatggtccggtgtccttttcactacaccatgtttgagctcagacccccactctcattccccaggtggctgacccagtccctgggggaagccctggatttcagaaagagccaagtctggatctgggaccctttccttccttccctggcttgtaactccaccaagcccatcagaaggagaaggaaggagactcacctctgcctcaatgtgaatcagaccctaccccaccacgatgtgccctggctgctgggctctccacctcaggccttggataatgctgttgcctcatctataacatgcatttgtctttgtaatgtcaccaccttcccagctctccctctggccctgcttcttcggggaactcctgaaatatcagttactcagccctgggccccaccacctaggccactcctccaaaggaagtctaggagctgggaggaaaagaaaagaggggaaaatgagtttttatggggctgaacggggagaaaaggtcatcatcgattctactttagaatgagagtgtgaaatagacatttgtaaatgtaaaacttttaaggtatatcattataactgaaggagaaggtgccccaaaatgcaagattttccacaagattcccagagacaggaaaatcctctggctggctaactggaagcatgtaggagaatccaagcgaggtcaacagagaaggcaggaatgtgtggcagatttagtgaaagctagagatatggcagcgaaaggatgtaaacagtgcctgctgaatgatttccaaagagaaaaaaagtttgccagaagtttgtcaagtcaaccaatgtagaaagctttgcttatggtaataaaaatggctcatacttatatagcacttactttgtttgcaagtactgctgtaaataaatgctttatgcaaacc

SEQ ID NO: 52 - protein, 427 aa, Homo sapiens
MEAMAASTSLPDPGDFDRNVPRICGVCGDRATGFHFNAMTCEGCKGFFRRSMKRKALFTCPFNGDCRITKDNRRHCQACRLKRCVDIGMMKEFILTDEEVQRKREMILKRKEEEALKDSLRPKLSEEQQRIIAILLDAHHKTYDPTYSDFCQFRPPVRVNDGGGSHPSRPNSRHTPSFSGDSSSSCSDHCITSSDMMDSSSFSNLDLSEEDSDDPSVTLELSQLSMLPHLADLVSYSIQKVIGFAKMIPGFRDLTSEDQIVLLKSSAIEVIMLRSNESFTMDDMSWTCGNQDYKYRVSDVTKAGHSLELIEPLIKFQVGLKKLNLHEEEHVLLMAICIVSPDRPGVQDAALIEAIQDRLSNTLQTYIRCRHPPPGSHLLYAKMIQKLADLRSLNEEHSKQYRCLSFQPECSMKLTPLVLEVFGNEIS

SEQ ID NO: 53 - DNA, 4446 bp, Homo sapiens
  CDS (1840)...(3144): PXR (NR1I2) variant 1
ttcttaaccctttccagctttcccaccctctttggctttagccatggccttctgatctgtgtttctcaggggacctgcaggccccagatatagccccatgctgtcctcctaccccagagcacactgttcaggctacttccactggtactgaaatccagtatttcacttactcttttcctttccaatatcctcatgacattcaatatttcacttactctaggtcctccctgcctaaggcccaagtcaactttctgtccagtgggatttgtaatccaatgcctcctagccctagcagaatcccatgtggataatcagaaatgtgactggaaaaaggacagagctctatggctgtgggtcccagtccccactgctggcagtaagtccccagcagtgagctgtgtaagcaccttacattctgcgcttggttgaaaacagcaaggcaagcatccacttgagaaatgtcaacccctaggaaatcccagcctcaagtctttctcatcccttgggaagtgcaaattggatagagaagaaaccaattaaaaacaaaacaaacaaatcatacttagatattctggcttttctcaccagggctggattaaagcatgtacttcaaaataataacaacttaagtcaataaataaatgtaaggaagtccaaatgttcacctgaagacaactgtggtcattttttggcaatcccaggttctcttttctacctgtttgctcaatcgtggtctccctctccctctcttgttggggcccatgcccctgctttactgttgccagaggcttgtacttgtttgccttttaggtaggagcagttacttccactcccctcacctgccataaagcatctttataaacaaagcaagtagaagaaacacatcctggtatccaccacattcggcttttgttgattctgttcacttgggagcacctgctgctagggaataagaaggttgaggctgaagagtgaggactcttcagctcccctctggcaggacccgggagaggaaagagccctcagctggtccatcctccccactcctggtcagccttctgttctgagatcaaagtggtggggtcacattctcgagaactgtgctcagccccctcatctcacaccctttccctctccctgtgtgcctgcccccctcttacataaccatgctggtgattggcaccgtcataaatcaatactttgctcactttcacatcaagtaacactatccagggaggtggtttcaacaaaggaggaagtataaggagatctaggttcaaattaatgttgcccctagtggtaaaggacagagaccctcagactgatgaaatgcactcagaattacttagacaaagcggatatttgccactctcttccccttttcctgtgtttttgtagtgaagagacctgaaagaaaaaagtagggagaacataatgagaacaaatacggtaatctcttcatttgctagttcaagtgctggacttgggacttaggaggggcaatggagccgcttagtgcctacatctgacttggactgaaatataggtgagagacaagattgtctcatatccggggaaatcataacctatgactaggacgggaagaggaagcactgcctttacttcagtgggaatctcggcctcagcctgcaagccaagtgttcacagtgagaaaagcaagagaataagctaatactcctgtcctgaacaaggcagcggctccttggtaaagctactccttgatcgatcctttgcaccggattgttcaaagtggaccccaggggagaagtcggagcaaagaacttaccaccaagcagtccaagaggcccagaagcaaacctggaggtgagacccaaagaaagctggaaccatgctgactttgtacactgtgaggacacagagtctgttcctggaaagcccagtgtcaacgcagatgaggaagtcggaggtccccaaatctgccgtgtatgtggggacaaggccactggctatcacttcaatgtcatgacatgtgaaggatgcaagggctttttcaggagggccatgaaacgcaacgcccggctgaggtgccccttccggaagggcgcctgcgagatcacccggaagacccggcgacagtgccaggcctgccgcctgcgcaagtgcctggagagcggcatgaagaaggagatgatcatgtccgacgaggccgtggaggagaggcgggccttgatcaagcggaagaaaagtgaacggacagggactcagccactgggagtgcaggggctgacagaggagcagcggatgatgatcagggagctgatggacgctcagatgaaaacctttgacactaccttctcccatttcaagaatttccggctgccaggggtgcttagcagtggctgcgagttgccagagtctctgcaggccccatcgagggaagaagctgccaagtggagccaggtccggaaagatctgtgctctttgaaggtctctctgcagctgcggggggaggatggcagtgtctggaactacaaacccccagccgacagtggcgggaaagagatcttctccctgctgccccacatggctgacatgtcaacctacatgttcaaaggcatcatcagctttgccaaagtcatctcctacttcagggacttgcccatcgaggaccagatctccctgctgaagggggccgctttcgagctgtgtcaactgagattcaacacagtgttcaacgcggagactggaacctgggagtgtggccggctgtcctactgcttggaagacactgcaggtggcttccagcaacttctactggagcccatgctgaaattccactacatgctgaagaagctgcagctgcatgaggaggagtatgtgctgatgcaggccatctccctcttctccccagaccgcccaggtgtgctgcagcaccgcgtggtggaccagctgcaggagcaattcgccattactctgaagtcctacattgaatgcaatcggccccagcctgctcataggttcttgttcctgaagatcatggctatgctcaccgagctccgcagcatcaatgctcagcacacccagcggctgctgcgcatccaggacatacacccctttgctacgcccctcatgcaggagttgttcggcatcacaggtagctgagcggctgcccttgggtgacacctccgagaggcagccagacccagagccctctgagccgccactcccgggccaagacagatggacactgccaagagccgacaatgccctgctggcctgtctccctagggaattcctgctatgacagctggctagcattcctcaggaaggacatgggtgccccccacccccagttcagtctgtagggagtgaagccacagactcttacgtggagagtgcactgacctgtaggtcaggaccatcagagaggcaaggttgccctttccttttaaaaggccctgtggtctggggagaaatccctcagatcccactaaagtgtcaaggtgtggaagggaccaagcgaccaaggataggccatctggggtctatgcccacatacccacgtttgttcgcttcctgagtcttttcattgctacctctaatagtcctgtctcccacttcccactcgttcccctcctcttccgagctgctttgtgggctccaggcctgtactcatcggcaggtgcatgagtatctgtgggagtcctctagagagatgagaagccaggaggcctgcaccaaatgtcagaagcttggcatgacctcattccggccacatcattctgtgtctctgcatccatttgaacacattattaagcaccgataataggtagcctgctgtggggtatacagcattgactcagatatagatcctgagctcacagagtttatagttaaaaaaacaaacagaaacacaaacaatttggatcaaaaggagaaatgataagtgacaaaagcagcacaaggaatttccctgtgtggatgctgagctgtgatggcgggcactgggtacccaagtgaaggttcccgaggacatgagtctgtaggagcaagggcacaaactgcagctgtgagtgcgtgtgtgtgatttggtgtaggtaggtctgtttgccacttgatggggcctgggtttgttcctggggctggaatgctgggtatgctctgtgacaaggctacgctgacaatcagttaaacacaccggagaagaaccatttacatgcaccttatatttctgtgtacacatctattctcaaagctaaagggtatgaaagtgcctgccttgtttatagccacttgtgagtaaaaatttttttgcattttcacaaattatactttatataaggcattccacacctaagaactagttttgggaaatgtagccctgggtttaatgtcaaatcaaggcaaaaggaattaaataatgtacttttggctaaaaaaaaaaaaaaaaaaaaaaaaaaaaaa

SEQ ID NO: 54 - protein, 434 aa, Homo sapiens
LEVRPKESWNHADFVHCEDTESVPGKPSVNADEEVGGPQICRVCGDKATGYHFNVMTCEGCKGFFRRAMKRNARLRCPFRKGACEITRKTRRQCQACRLRKCLESGMKKEMIMSDEAVEERRALIKRKKSERTGTQPLGVQGLTEEQRMMIRELMDAQMKTFDTTFSHFKNFRLPGVLSSGCELPESLQAPSREEAAKWSQVRKDLCSLKVSLQLRGEDGSVWNYKPPADSGGKEIFSLLPHMADMSTYMFKGIISFAKVISYFRDLPIEDQISLLKGAAFELCQLRFNTVFNAETGTWECGRLSYCLEDTAGGFQQLLLEPMLKFHYMLKKLQLHEEEYVLMQAISLFSPDRPGVLQHRVVDQLQEQFAITLKSYIECNRPQPAHRFLFLKIMAMLTELRSINAQHTQRLLRIQDIHPFATPLMQELFGITGS

SEQ ID NO: 55 - DNA, 2790 bp, Homo sapiens
  CDS (49)...(1470): PXR (NR1I2) variant 2
ggcctgctgggttagtgctggcagccccctgaggccaaggacagcagcatgacagtcaccaggactcaccacttcaaggaggggtccctcagagcacctgccatacccctgcacagtgctgcggctgagttggcttcaaaccatccaagaggcccagaagcaaacctggaggtgagacccaaagaaagctggaaccatgctgactttgtacactgtgaggacacagagtctgttcctggaaagcccagtgtcaacgcagatgaggaagtcggaggtccccaaatctgccgtgtatgtggggacaaggccactggctatcacttcaatgtcatgacatgtgaaggatgcaagggctttttcaggagggccatgaaacgcaacgcccggctgaggtgccccttccggaagggcgcctgcgagatcacccggaagacccggcgacagtgccaggcctgccgcctgcgcaagtgcctggagagcggcatgaagaaggagatgatcatgtccgacgaggccgtggaggagaggcgggccttgatcaagcggaagaaaagtgaacggacagggactcagccactgggagtgcaggggctgacagaggagcagcggatgatgatcagggagctgatggacgctcagatgaaaacctttgacactaccttctcccatttcaagaatttccggctgccaggggtgcttagcagtggctgcgagttgccagagtctctgcaggccccatcgagggaagaagctgccaagtggagccaggtccggaaagatctgtgctctttgaaggtctctctgcagctgcggggggaggatggcagtgtctggaactacaaacccccagccgacagtggcgggaaagagatcttctccctgctgccccacatggctgacatgtcaacctacatgttcaaaggcatcatcagctttgccaaagtcatctcctacttcagggacttgcccatcgaggaccagatctccctgctgaagggggccgctttcgagctgtgtcaactgagattcaacacagtgttcaacgcggagactggaacctgggagtgtggccggctgtcctactgcttggaagacactgcaggtggcttccagcaacttctactggagcccatgctgaaattccactacatgctgaagaagctgcagctgcatgaggaggagtatgtgctgatgcaggccatctccctcttctccccagaccgcccaggtgtgctgcagcaccgcgtggtggaccagctgcaggagcaattcgccattactctgaagtcctacattgaatgcaatcggccccagcctgctcataggttcttgttcctgaagatcatggctatgctcaccgagctccgcagcatcaatgctcagcacacccagcggctgctgcgcatccaggacatacacccctttgctacgcccctcatgcaggagttgttcggcatcacaggtagctgagcggctgcccttgggtgacacctccgagaggcagccagacccagagccctctgagccgccactcccgggccaagacagatggacactgccaagagccgacaatgccctgctggcctgtctccctagggaattcctgctatgacagctggctagcattcctcaggaaggacatgggtgccccccacccccagttcagtctgtagggagtgaagccacagactcttacgtggagagtgcactgacctgtaggtcaggaccatcagagaggcaaggttgccctttccttttaaaaggccctgtggtctggggagaaatccctcagatcccactaaagtgtcaaggtgtggaagggaccaagcgaccaaggataggccatctggggtctatgcccacatacccacgtttgttcgcttcctgagtcttttcattgctacctctaatagtcctgtctcccacttcccactcgttcccctcctcttccgagctgctttgtgggctccaggcctgtactcatcggcaggtgcatgagtatctgtgggagtcctctagagagatgagaagccaggaggcctgcaccaaatgtcagaagcttggcatgacctcattccggccacatcattctgtgtctctgcatccatttgaacacattattaagcaccgataataggtagcctgctgtggggtatacagcattgactcagatatagatcctgagctcacagagtttatagttaaaaaaacaaacagaaacacaaacaatttggatcaaaaggagaaatgataagtgacaaaagcagcacaaggaatttccctgtgtggatgctgagctgtgatggcgggcactgggtacccaagtgaaggttcccgaggacatgagtctgtaggagcaagggcacaaactgcagctgtgagtgcgtgtgtgtgatttggtgtaggtaggtctgtttgccacttgatggggcctgggtttgttcctggggctggaatgctgggtatgctctgtgacaaggctacgctgacaatcagttaaacacaccggagaagaaccatttacatgcaccttatatttctgtgtacacatctattctcaaagctaaagggtatgaaagtgcctgccttgtttatagccacttgtgagtaaaaatttttttgcattttcacaaattatactttatataaggcattccacacctaagaactagttttgggaaatgtagccctgggtttaatgtcaaatcaaggcaaaaggaattaaataatgtacttttggctaaaaaaaaaaaaaaaaaaaaaaaaaaaaaaaaaaaaaaaaaaaaaaaa

SEQ ID NO: 56 - protein, 473 aa, Homo sapiens
MTVTRTHHFKEGSLRAPAIPLHSAAAELASNHPRGPEANLEVRPKESWNHADFVHCEDTESVPGKPSVNADEEVGGPQICRVCGDKATGYHFNVMTCEGCKGFFRRAMKRNARLRCPFRKGACEITRKTRRQCQACRLRKCLESGMKKEMIMSDEAVEERRALIKRKKSERTGTQPLGVQGLTEEQRMMIRELMDAQMKTFDTTFSHFKNFRLPGVLSSGCELPESLQAPSREEAAKWSQVRKDLCSLKVSLQLRGEDGSVWNYKPPADSGGKEIFSLLPHMADMSTYMFKGIISFAKVISYFRDLPIEDQISLLKGAAFELCQLRFNTVFNAETGTWECGRLSYCLEDTAGGFQQLLLEPMLKFHYMLKKLQLHEEEYVLMQAISLFSPDRPGVLQHRVVDQLQEQFAITLKSYIECNRPQPAHRFLFLKIMAMLTELRSINAQHTQRLLRIQDIHPFATPLMQELFGITGS

SEQ ID NO: 57 - DNA, 4335 bp, Homo sapiens
  CDS (1840)...(3033): PXR (NR1I2) variant 3
ttcttaaccctttccagctttcccaccctctttggctttagccatggccttctgatctgtgtttctcaggggacctgcaggccccagatatagccccatgctgtcctcctaccccagagcacactgttcaggctacttccactggtactgaaatccagtatttcacttactcttttcctttccaatatcctcatgacattcaatatttcacttactctaggtcctccctgcctaaggcccaagtcaactttctgtccagtgggatttgtaatccaatgcctcctagccctagcagaatcccatgtggataatcagaaatgtgactggaaaaaggacagagctctatggctgtgggtcccagtccccactgctggcagtaagtccccagcagtgagctgtgtaagcaccttacattctgcgcttggttgaaaacagcaaggcaagcatccacttgagaaatgtcaacccctaggaaatcccagcctcaagtctttctcatcccttgggaagtgcaaattggatagagaagaaaccaattaaaaacaaaacaaacaaatcatacttagatattctggcttttctcaccagggctggattaaagcatgtacttcaaaataataacaacttaagtcaataaataaatgtaaggaagtccaaatgttcacctgaagacaactgtggtcattttttggcaatcccaggttctcttttctacctgtttgctcaatcgtggtctccctctccctctcttgttggggcccatgcccctgctttactgttgccagaggcttgtacttgtttgccttttaggtaggagcagttacttccactcccctcacctgccataaagcatctttataaacaaagcaagtagaagaaacacatcctggtatccaccacattcggcttttgttgattctgttcacttgggagcacctgctgctagggaataagaaggttgaggctgaagagtgaggactcttcagctcccctctggcaggacccgggagaggaaagagccctcagctggtccatcctccccactcctggtcagccttctgttctgagatcaaagtggtggggtcacattctcgagaactgtgctcagccccctcatctcacaccctttccctctccctgtgtgcctgcccccctcttacataaccatgctggtgattggcaccgtcataaatcaatactttgctcactttcacatcaagtaacactatccagggaggtggtttcaacaaaggaggaagtataaggagatctaggttcaaattaatgttgcccctagtggtaaaggacagagaccctcagactgatgaaatgcactcagaattacttagacaaagcggatatttgccactctcttccccttttcctgtgtttttgtagtgaagagacctgaaagaaaaaagtagggagaacataatgagaacaaatacggtaatctcttcatttgctagttcaagtgctggacttgggacttaggaggggcaatggagccgcttagtgcctacatctgacttggactgaaatataggtgagagacaagattgtctcatatccggggaaatcataacctatgactaggacgggaagaggaagcactgcctttacttcagtgggaatctcggcctcagcctgcaagccaagtgttcacagtgagaaaagcaagagaataagctaatactcctgtcctgaacaaggcagcggctccttggtaaagctactccttgatcgatcctttgcaccggattgttcaaagtggaccccaggggagaagtcggagcaaagaacttaccaccaagcagtccaagaggcccagaagcaaacctggaggtgagacccaaagaaagctggaaccatgctgactttgtacactgtgaggacacagagtctgttcctggaaagcccagtgtcaacgcagatgaggaagtcggaggtccccaaatctgccgtgtatgtggggacaaggccactggctatcacttcaatgtcatgacatgtgaaggatgcaagggctttttcaggagggccatgaaacgcaacgcccggctgaggtgccccttccggaagggcgcctgcgagatcacccggaagacccggcgacagtgccaggcctgccgcctgcgcaagtgcctggagagcggcatgaagaaggagatgatcatgtccgacgaggccgtggaggagaggcgggccttgatcaagcggaagaaaagtgaacggacagggactcagccactgggagtgcaggggctgacagaggagcagcggatgatgatcagggagctgatggacgctcagatgaaaacctttgacactaccttctcccatttcaagaatttccgggtctctctgcagctgcggggggaggatggcagtgtctggaactacaaacccccagccgacagtggcgggaaagagatcttctccctgctgccccacatggctgacatgtcaacctacatgttcaaaggcatcatcagctttgccaaagtcatctcctacttcagggacttgcccatcgaggaccagatctccctgctgaagggggccgctttcgagctgtgtcaactgagattcaacacagtgttcaacgcggagactggaacctgggagtgtggccggctgtcctactgcttggaagacactgcaggtggcttccagcaacttctactggagcccatgctgaaattccactacatgctgaagaagctgcagctgcatgaggaggagtatgtgctgatgcaggccatctccctcttctccccagaccgcccaggtgtgctgcagcaccgcgtggtggaccagctgcaggagcaattcgccattactctgaagtcctacattgaatgcaatcggccccagcctgctcataggttcttgttcctgaagatcatggctatgctcaccgagctccgcagcatcaatgctcagcacacccagcggctgctgcgcatccaggacatacacccctttgctacgcccctcatgcaggagttgttcggcatcacaggtagctgagcggctgcccttgggtgacacctccgagaggcagccagacccagagccctctgagccgccactcccgggccaagacagatggacactgccaagagccgacaatgccctgctggcctgtctccctagggaattcctgctatgacagctggctagcattcctcaggaaggacatgggtgccccccacccccagttcagtctgtagggagtgaagccacagactcttacgtggagagtgcactgacctgtaggtcaggaccatcagagaggcaaggttgccctttccttttaaaaggccctgtggtctggggagaaatccctcagatcccactaaagtgtcaaggtgtggaagggaccaagcgaccaaggataggccatctggggtctatgcccacatacccacgtttgttcgcttcctgagtcttttcattgctacctctaatagtcctgtctcccacttcccactcgttcccctcctcttccgagctgctttgtgggctccaggcctgtactcatcggcaggtgcatgagtatctgtgggagtcctctagagagatgagaagccaggaggcctgcaccaaatgtcagaagcttggcatgacctcattccggccacatcattctgtgtctctgcatccatttgaacacattattaagcaccgataataggtagcctgctgtggggtatacagcattgactcagatatagatcctgagctcacagagtttatagttaaaaaaacaaacagaaacacaaacaatttggatcaaaaggagaaatgataagtgacaaaagcagcacaaggaatttccctgtgtggatgctgagctgtgatggcgggcactgggtacccaagtgaaggttcccgaggacatgagtctgtaggagcaagggcacaaactgcagctgtgagtgcgtgtgtgtgatttggtgtaggtaggtctgtttgccacttgatggggcctgggtttgttcctggggctggaatgctgggtatgctctgtgacaaggctacgctgacaatcagttaaacacaccggagaagaaccatttacatgcaccttatatttctgtgtacacatctattctcaaagctaaagggtatgaaagtgcctgccttgtttatagccacttgtgagtaaaaatttttttgcattttcacaaattatactttatataaggcattccacacctaagaactagttttgggaaatgtagccctgggtttaatgtcaaatcaaggcaaaaggaattaaataatgtacttttggctaaaaaaaaaaaaaaaaaaaaaaaaaaaaaa

SEQ ID NO: 58 - protein, 397 aa, Homo sapiens
MEVRPKESWNHADFVHCEDTESVPGKPSVNADEEVGGPQICRVCGDKATGYHFNVMTCEGCKGFFRRAMKRNARLRCPFRKGACEITRKTRRQCQACRLRKCLESGMKKEMIMSDEAVEERRALIKRKKSERTGTQPLGVQGLTEEQRMMIRELMDAQMKTFDTTFSHFKNFRVSLQLRGEDGSVWNYKPPADSGGKEIFSLLPHMADMSTYMFKGIISFAKVISYFRDLPIEDQISLLKGAAFELCQLRFNTVFNAETGTWECGRLSYCLEDTAGGFQQLLLEPMLKFHYMLKKLQLHEEEYVLMQAISLFSPDRPGVLQHRVVDQLQEQFAITLKSYIECNRPQPAHRFLFLKIMAMLTELRSINAQHTQRLLRIQDIHPFATPLMQELFGITGS

SEQ ID NO: 59 - DNA, 1336 bp, Homo sapiens
  CDS (159)...(1205): CAR alpha (NR1I3)
cctaactccaatcactggcaactcctgagatcagaggaaaaccagcaacagcgtgggagtttggggagaggcattccataccagattctgtggcctgcaggtgacatgctgcctaagagaagcaggagtctgtgacagccaccccaacacgtgacgtcatggccagtagggaagatgagctgaggaactgtgtggtatgtggggaccaagccacaggctaccactttaatgcgctgacttgtgagggctgcaagggtttcttcaggagaacagtcagcaaaagcattggtcccacctgcccctttgctggaagctgtgaagtcagcaagactcagaggcgccactgcccagcctgcaggttgcagaagtgcttagatgctggcatgaggaaagacatgatactgtcggcagaagccctggcattgcggcgagcaaagcaggcccagcggcgggcacagcaaacacctgtgcaactgagtaaggagcaagaagagctgatccggacactcctgggggcccacacccgccacatgggcaccatgtttgaacagtttgtgcagtttaggcctccagctcatctgttcatccatcaccagcccttgcccaccctggcccctgtgctgcctctggtcacacacttcgcagacatcaacactttcatggtactgcaagtcatcaagtttactaaggacctgcccgtcttccgttccctgcccattgaagaccagatctcccttctcaagggagcagctgtggaaatctgtcacatcgtactcaataccactttctgtctccaaacacaaaacttcctctgcgggcctcttcgctacacaattgaagatggagcccgtgtggggttccaggtagagtttttggagttgctctttcacttccatggaacactacgaaaactgcagctccaagagcctgagtatgtgctcttggctgccatggccctcttctctcctgaccgacctggagttacccagagagatgagattgatcagctgcaagaggagatggcactgactctgcaaagctacatcaagggccagcagcgaaggccccgggatcggtttctgtatgcgaagttgctaggcctgctggctgagctccggagcattaatgaggcctacgggtaccaaatccagcacatccagggcctgtctgccatgatgccgctgctccaggagatctgcagctgaggccatgctcacttccttccccagctcacctggaacaccctggatacactggagtgggaaaatgctgggaccaaagattgggccgggttcaaagggagcccagtggttgcaatgaaagactaaagcaaaac

SEQ ID NO: 60 - protein, 348 aa, Homo sapiens
MASREDELRNCVVCGDQATGYHFNALTCEGCKGFFRRTVSKSIGPTCPFAGSCEVSKTQRRHCPACRLQKCLDAGMRKDMILSAEALALRRAKQAQRRAQQTPVQLSKEQEELIRTLLGAHTRHMGTMFEQFVQFRPPAHLFIHHQPLPTLAPVLPLVTHFADINTFMVLQVIKFTKDLPVFRSLPIEDQISLLKGAAVEICHIVLNTTFCLQTQNFLCGPLRYTIEDGARVGFQVEFLELLFHFHGTLRKLQLQEPEYVLLAAMALFSPDRPGVTQRDEIDQLQEEMALTLQSYIKGQQRRPRDRFLYAKLLGLLAELRSINEAYGYQIQHIQGLSAMMPLLQEICS

SEQ ID NO: 61 - DNA, 3209 bp, Homo sapiens
  CDS (90)...(1484): HNF4 alpha (NR2A1) variant 1
gggaggaggcagtgggagggcggagggcgggggccttcggggtgggcgcccagggtagggcaggtggccgcggcgtggaggcagggagaatgcgactctccaaaaccctcgtcgacatggacatggccgactacagtgctgcactggacccagcctacaccaccctggaatttgagaatgtgcaggtgttgacgatgggcaatgacacgtccccatcagaaggcaccaacctcaacgcgcccaacagcctgggtgtcagcgccctgtgtgccatctgcggggaccgggccacgggcaaacactacggtgcctcgagctgtgacggctgcaagggcttcttccggaggagcgtgcggaagaaccacatgtactcctgcagatttagccggcagtgcgtggtggacaaagacaagaggaaccagtgccgctactgcaggctcaagaaatgcttccgggctggcatgaagaaggaagccgtccagaatgagcgggaccggatcagcactcgaaggtcaagctatgaggacagcagcctgccctccatcaatgcgctcctgcaggcggaggtcctgtcccgacagatcacctcccccgtctccgggatcaacggcgacattcgggcgaagaagattgccagcatcgcagatgtgtgtgagtccatgaaggagcagctgctggttctcgttgagtgggccaagtacatcccagctttctgcgagctccccctggacgaccaggtggccctgctcagagcccatgctggcgagcacctgctgctcggagccaccaagagatccatggtgttcaaggacgtgctgctcctaggcaatgactacattgtccctcggcactgcccggagctggcggagatgagccgggtgtccatacgcatccttgacgagctggtgctgcccttccaggagctgcagatcgatgacaatgagtatgcctacctcaaagccatcatcttctttgacccagatgccaaggggctgagcgatccagggaagatcaagcggctgcgttcccaggtgcaggtgagcttggaggactacatcaacgaccgccagtatgactcgcgtggccgctttggagagctgctgctgctgctgcccaccttgcagagcatcacctggcagatgatcgagcagatccagttcatcaagctcttcggcatggccaagattgacaacctgttgcaggagatgctgctgggagggtcccccagcgatgcaccccatgcccaccaccccctgcaccctcacctgatgcaggaacatatgggaaccaacgtcatcgttgccaacacaatgcccactcacctcagcaacggacagatgtccacccctgagaccccacagccctcaccgccaggtggctcagggtctgagccctataagctcctgccgggagccgtcgccacaatcgtcaagcccctctctgccatcccccagccgaccatcaccaagcaggaagttatctagcaagccgctggggcttgggggctccactggctccccccagccccctaagagagcacctggtgatcacgtggtcacggcaaaggaagacgtgatgccaggaccagtcccagagcaggaatgggaaggatgaagggcccgagaacatggcctaagggccacatcccactgccacccttgacgccctgctctggataacaagactttgacttggggagacctctactgccttggacaacttttctcatgttgaagccactgccttcaccttcaccttcatccatgtccaacccccgacttcatcccaaaggacagccgcctggagatgacttgaggccttacttaaacccagctcccttcttccctagcctggtgcttctcctctcctagcccctgtcatggtgtccagacagagccctgtgaggctgggtccaattgtggcacttggggcaccttgctcctccttctgctgctgcccccacctctgctgcctccctctgctgtcaccttgctcagccatcccgtcttctccaacaccacctctccagaggccaaggaggccttggaaacgattcccccagtcattctgggaacatgttgtaagcactgactgggaccaggcaccaggcagggtctagaaggctgtggtgagggaagacgcctttctcctccaacccaacctcatcctccttcttcagggacttgggtgggtacttgggtgaggatccctgaaggccttcaacccgagaaaacaaacccaggttggcgactgcaacaggaacttggagtggagaggaaaagcatcagaaagaggcagaccatccaccaggcctttgagaaagggtagaattctggctggtagagcaggtgagatgggacattccaaagaacagcctgagccaaggcctagtggtagtaagaatctagcaagaattgaggaagaatggtgtgggagagggatgatgaagagagagagggcctgctggagagcatagggtctggaacaccaggctgaggtcctgatcagcttcaaggagtatgcagggagctgggcttccagaaaatgaacacagcagttctgcagaggacgggaggctggaagctgggaggtcaggtggggtggatgatataatgcgggtgagagtaatgaggcttggggctggagaggacaagatgggtaaaccctcacatcagagtgacatccaggaggaataagctcccagggcctgtctcaagctcttccttactcccaggcactgtcttaaggcatctgacatgcatcatctcatttaatcctcccttcctccctattaacctagagattgtttttgttttttattctcctcctccctccccgccctcacccgccccactccctcctaacctagagattgttacagaagctgaaattgcgttctaagaggtgaagtgattttttttctgaaactcacacaactaggaagtggctgagtcaggacttgaacccaggtctccctggatcagaacaggagctcttaactacagtggctgaatagcttctccaaaggctccctgtgttctcaccgtgatcaagttgaggggcttccggctcccttctacagcctcagaaaccagactcgttcttctgggaaccctgcccactcccaggaccaagattggcctgaggctgcactaaaattcacttagggtcgagcatcctgtttgctgataaatattaaggagaattca

SEQ ID NO: 62 - protein, 464 aa, Homo sapiens
MRLSKTLVDMDMADYSAALDPAYTTLEFENVQVLTMGNDTSPSEGTNLNAPNSLGVSALCAICGDRATGKHYGASSCDGCKGFFRRSVRKNHMYSCRFSRQCVVDKDKRNQCRYCRLKKCFRAGMKKEAVQNERDRISTRRSSYEDSSLPSINALLQAEVLSRQITSPVSGINGDIRAKKIASIADVCESMKEQLLVLVEWAKYIPAFCELPLDDQVALLRAHAGEHLLLGATKRSMVFKDVLLLGNDYIVPRHCPELAEMSRVSIRILDELVLPFQELQIDDNEYAYLKAIIFFDPDAKGLSDPGKIKRLRSQVQVSLEDYINDRQYDSRGRFGELLLLLPTLQSITWQMIEQIQFIKLFGMAKIDNLLQEMLLGGSPSDAPHAHHPLHPHLMQEHMGTNVIVANTMPTHLSNGQMSTPETPQPSPPGGSGSEPYKLLPGAVATIVKPLSAIPQPTITKQEVI

SEQ ID NO: 63 - DNA, 3209 bp, Homo sapiens; identical to SEQ ID NO: 61
  CDS (90)...(1484): HNF4 alpha (NR2A1) variant 1

SEQ ID NO: 64 - protein, 474 aa, Homo sapiens
MRLSKTLVDMDMADYSAALDPAYTTLEFENVQVLTMGNDTSPSEGTNLNAPNSLGVSALCAICGDRATGKHYGASSCDGCKGFFRRSVRKNHMYSCRFSRQCVVDKDKRNQCRYCRLKKCFRAGMKKEAVQNERDRISTRRSSYEDSSLPSINALLQAEVLSRQITSPVSGINGDIRAKKIASIADVCESMKEQLLVLVEWAKYIPAFCELPLDDQVALLRAHAGEHLLLGATKRSMVFKDVLLLGNDYIVPRHCPELAEMSRVSIRILDELVLPFQELQIDDNEYAYLKAIIFFDPDAKGLSDPGKIKRLRSQVQVSLEDYINDRQYDSRGRFGELLLLLPTLQSITWQMIEQIQFIKLFGMAKIDNLLQEMLLGGSPSDAPHAHHPLHPHLMQEHMGTNVIVANTMPTHLSNGQMCEWPRPRGQAATPETPQPSPPGGSGSEPYKLLPGAVATIVKPLSAIPQPTITKQEVI

SEQ ID NO: 65 - DNA, 1600 bp, Homo sapiens
  CDS (90)...(1343): HNF4 alpha (NR2A1) variant 3
gggaggaggcagtgggagggcggagggcgggggccttcggggtgggcgcccagggtagggcaggtggccgcggcgtggaggcagggagaatgcgactctccaaaaccctcgtcgacatggacatggccgactacagtgctgcactggacccagcctacaccaccctggaatttgagaatgtgcaggtgttgacgatgggcaatgacacgtccccatcagaaggcaccaacctcaacgcgcccaacagcctgggtgtcagcgccctgtgtgccatctgcggggaccgggccacgggcaaacactacggtgcctcgagctgtgacggctgcaagggcttcttccggaggagcgtgcggaagaaccacatgtactcctgcagatttagccggcagtgcgtggtggacaaagacaagaggaaccagtgccgctactgcaggctcaagaaatgcttccgggctggcatgaagaaggaagccgtccagaatgagcgggaccggatcagcactcgaaggtcaagctatgaggacagcagcctgccctccatcaatgcgctcctgcaggcggaggtcctgtcccgacagatcacctcccccgtctccgggatcaacggcgacattcgggcgaagaagattgccagcatcgcagatgtgtgtgagtccatgaaggagcagctgctggttctcgttgagtgggccaagtacatcccagctttctgcgagctccccctggacgaccaggtggccctgctcagagcccatgctggcgagcacctgctgctcggagccaccaagagatccatggtgttcaaggacgtgctgctcctaggcaatgactacattgtccctcggcactgcccggagctggcggagatgagccgggtgtccatacgcatccttgacgagctggtgctgcccttccaggagctgcagatcgatgacaatgagtatgcctacctcaaagccatcatcttctttgacccagatgccaaggggctgagcgatccagggaagatcaagcggctgcgttcccaggtgcaggtgagcttggaggactacatcaacgaccgccagtatgactcgcgtggccgctttggagagctgctgctgctgctgcccaccttgcagagcatcacctggcagatgatcgagcagatccagttcatcaagctcttcggcatggccaagattgacaacctgttgcaggagatgctgctgggaggtccgtgccaagcccaggaggggcggggttggagtggggactccccaggagacaggcctcacacagtgagctcacccctcagctccttggcttccccactgtgccgctttgggcaagttgcttaacctgtctgtgcctcagtttcctcaccagaaaaatgggaacaaggcaatggtctatttgttcaggcaccgagaacctagcacgtgccagtcactgttctaagtgctggcaattcagcaaagaacaagatctttgccctcggggaggctgtgtgtgtgtgagtatgtatggatgcgtggatatctgtgtatatgcccgtatgtgcgtgcatgtgtatataaagcctcacattttatgattttgaaataaacaggtaata

SEQ ID NO: 66 - protein, 417 aa, Homo sapiens
MRLSKTLVDMDMADYSAALDPAYTTLEFENVQVLTMGNDTSPSEGTNLNAPNSLGVSALCAICGDRATGKHYGASSCDGCKGFFRRSVRKNHMYSCRFSRQCVVDKDKRNQCRYCRLKKCFRAGMKKEAVQNERDRISTRRSSYEDSSLPSINALLQAEVLSRQITSPVSGINGDIRAKKIASIADVCESMKEQLLVLVEWAKYIPAFCELPLDDQVALLRAHAGEHLLLGATKRSMVFKDVLLLGNDYIVPRHCPELAEMSRVSIRILDELVLPFQELQIDDNEYAYLKAIIFFDPDAKGLSDPGKIKRLRSQVQVSLEDYINDRQYDSRGRFGELLLLLPTLQSITWQMIEQIQFIKLFGMAKIDNLLQEMLLGGPCQAQEGRGWSGDSPGDRPHTVSSPLSSLASPLCRFGQVA

SEQ ID NO: 67 - DNA, 4154 bp, Homo sapiens
  CDS (137)...(1363): HNF4 gamma (NR2A2)
gagggtatcagaaccaatactggacatggacatggcaaattacagtgaagttttggacccaacttacacaactttggagtttgaaactatgcagattctatataattcaagtgatagttctgccccagagacaagtatgaataccacagacaacggtgtcaactgtctgtgtgctatctgtggggacagagcaacaggaaaacactatggggcatccagctgtgatgggtgcaagggtttcttcagacgcagcattcgtaagagtcacgtttattcttgcaggttcagtcggcaatgtgttgttgacaaggacaaaaggaatcaatgtagatattgtcgattaagaaagtgttttagagcgggaatgaaaaaagaagctgtacaaaatgaacgtgacagaataagcaccagaagaagcacatttgatggcagcaacatcccctccattaacacactggcacaagctgaagttcggtctcgccagatctcagtctcaagccctgggtcaagcactgacataaacgttaagaaaattgcaagtattggtgatgtctgtgaatctatgaaacagcagctcttagtcttggtggaatgggctaaatatattcctgccttctgtgaattaccattggatgatcaggtggcactgttgagagctcacgcaggggagcacttactgcttggagctacaaagagatccatgatgtataaagatattttgcttttgggaaacaactatgttattcaccgcaacagctgtgaagttgagattagccgtgtggccaatcgtgttctagatgagctggttagaccatttcaagaaatccagattgatgacaatgagtatgcttgtttaaaggcaattgtattttttgatccagatgcaaaagggctaagcgatccagtaaaaattaagaacatgaggttccaagtgcagatcggtttggaggactacatcaatgatcggcagtatgactcccgggggaggtttggagagttgcttctgctcctgcccacactgcagagcatcacgtggcaaatgattgagcaaatacagtttgttaaactttttgggatggttaaaattgacaatctacttcaggaaatgctattaggtggggcttccaatgatggcagtcatctccatcatccaatgcatccacatttgtctcaagacccattaactggacaaactatacttttaggtcccatgtcaacactggttcatgcagaccagatctcaactcctgaaaccccactcccttccccaccacaaggctctgggcaagaacagtacaaaatagctgcaaaccaagcatcagtcatttcacaccagcatctctccaaacaaaagcaattgtgaaaatgtgtttacttcagaacggcactacataaatgtgaaaagttgttgatcttgaaatatctcaggatagcacttttggcaaactcttagccaaggcttcttcattggtgctgttataagatggtgtcctattttcttgtttatacgttcattctgtttgttattgctactatgtaaaactttcacatgcaaccaatgtatatctgagtttgaagatgtttatatagggtattttttccaactgcccctgcattgtgcctgaaccaattgaatcttatgtatgagtttcatttgttttattaatgttaatttaaatctgtaaataattgctttattgtgatgtgatacagaacaaagtgttcgtttttgactgaaaatagtagatcagaaatctcagtttaatataaaatgagctaagtttttaaaaataaattataaacttggagattagaaaaataaagcagttgctgtagaataggctgtatctttttcaagaagaatctcttatggacagtctgtggtaaagaagcaactctttgctttagagttaaatattcctatcttaagtttagaaaaatacaaaaaaccattccaaggatgactggatactttttgaaatctgactttctttgaagatgtatgttaagcaaaaacatgttgcttttatcagttaggatacagggtgaactgtaacaaagaaacccctaaaacagtgactaaatcaagagaggaatctatttctttctcctgaaacaatttagaaaatagttatccattgactagaaattagtacatgcccacagctggctcccacggtagccaggagaattatctataggtggaaagtctgtgtcagccaaagccatgtcactctgagagaactgattctgaggacaagttagccatctaccacccatgtcccttatttggtcctcacaataacactttaggagagatatcattatcgctgttttataaataagggaaactttagcttgagggtttaaggaacataaccaaagttcacaaacataacgagtgagagaaacacattcaagcccaggtctagttgactttaatgaatctttggtgtggaatgaaaaatgtgaacttcttactcatagtgtggtttttaaatatatgcagttgagtgatgattggatactattcatcatattgcctataatatatatttaccgataagcagcgagtgtaaaattgttgtagcttgaataagaaaccacttttgtagttttaaccagactttctcttaaaaacattagataaaataaaagattcaccggatggattctgatgaaaacgaaaacaaagtaaaatgactggcttagcagattctttgaaatgtagcagcccagggatgtaccaaatgtcgaattctagactgaggagtagagttcattggagtcttaaactctctgatatcacttaaagctggagtttattttaaaacaaatgaagcatgggccacctcatgatgcagtggctcctctctggttgaggagagggaaaattggaaaaactggtcgagtaattatcaataattttttttaaaaagaggatcccaaactgtaaaagattgaaataatctttctcaggattttttaaatgtctaagattatgatgtcatatctcccacttaccttataagtaaaaaggttaatatcaagtaacttattagctcttaaagtaaaattgaacttattaaaagctatctatgatttaatagatttaataaaattccttcacgacctggtacccttgtgaaactgtaaaatatatcatatggggggagctttttaactcttattttttgaaaatttactgtagcttctatttcgtgaataagaatgttttgattttgatcatacaaataacttttgtagatttttgtttacttttgggggggttcccttagaagacattaaaaaaaaatactgccttggtctgtgcaggctgctgtaatgaaatactatgaacttggcagcttataaacaacagaaatttatttctcgctgttctcaatggtgggaagtccaagattaagggatcaacaaattaggcctctggatcatacatggcattttctagctgtgtccttatacataaaaggaaaaaggtagctctctcgagtctctttaataaagatactaattctcatgactgaatcaccctccaaaggccccacctcctaataccatcactctggggactaggtgtcagcatgtgaattttggaaaacacaaaaattcagaacatagcaaatacctttgaagtataaaagataaaattcatttttagtgaaccctgtaatttattcgtgtatatttactaaacagctgtatctttgaaattgttagtaatgattctgcttcaataactatggtcagggaatttataatattatatttttatatactgaactgccatagatgctggaaaaaaggaactgatgttttcagcatattttcaaaatattgataagggaagttattacttttatatagtattcaacctttttcaggtaatagaagtgaataatttattgtgaaataattcattttataaatgtataattatttttataaattttattgttggaaatcaaaaattagtagattttttaccatgttaaattatagtgagattaaagtattactaaactgtgatgctatgtttgtttcactaaactttctaaataaaaactgagaaaaaaaaaaaaaaaaaaaaaaaaaaaaaaaaaaaaaaaaagaaaaaaaaaaaaaaaaaaaca

SEQ ID NO: 68 - protein, 408 aa, Homo sapiens
MNTTDNGVNCLCAICGDRATGKHYGASSCDGCKGFFRRSIRKSHVYSCRFSRQCVVDKDKRNQCRYCRLRKCFRAGMKKEAVQNERDRISTRRSTFDGSNIPSINTLAQAEVRSRQISVSSPGSSTDINVKKIASIGDVCESMKQQLLVLVEWAKYIPAFCELPLDDQVALLRAHAGEHLLLGATKRSMMYKDILLLGNNYVIHRNSCEVEISRVANRVLDELVRPFQEIQIDDNEYACLKAIVFFDPDAKGLSDPVKIKNMRFQVQIGLEDYINDRQYDSRGRFGELLLLLPTLQSITWQMIEQIQFVKLFGMVKIDNLLQEMLLGGASNDGSHLHHPMHPHLSQDPLTGQTILLGPMSTLVHADQISTPETPLPSPPQGSGQEQYKIAANQASVISHQHLSKQKQL

SEQ ID NO: 69 - DNA, 5449 bp, Homo sapiens
  CDS (69)...(1457): RXR alpha (NR2B1)
gcgccgggggccgccgcgcccgccgcccgctgcctgcgccgccggccgggcatgagttagtcgcagacatggacaccaaacatttcctgccgctcgatttctccacccaggtgaactcctccctcacctccccgacggggcgaggctccatggctgccccctcgctgcacccgtccctggggcctggcatcggctccccgggacagctgcattctcccatcagcaccctgagctcccccatcaacggcatgggcccgcctttctcggtcatcagctcccccatgggcccccactccatgtcggtgcccaccacacccaccctgggcttcagcactggcagcccccagctcagctcacctatgaaccccgtcagcagcagcgaggacatcaagccccccctgggcctcaatggcgtcctcaaggtccccgcccacccctcaggaaacatggcttccttcaccaagcacatctgcgccatctgcggggaccgctcctcaggcaagcactatggagtgtacagctgcgaggggtgcaagggcttcttcaagcggacggtgcgcaaggacctgacctacacctgccgcgacaacaaggactgcctgattgacaagcggcagcggaaccggtgccagtactgccgctaccagaagtgcctggccatgggcatgaagcgggaagccgtgcaggaggagcggcagcgtggcaaggaccggaacgagaatgaggtggagtcgaccagcagcgccaacgaggacatgccggtggagaggatcctggaggctgagctggccgtggagcccaagaccgagacctacgtggaggcaaacatggggctgaaccccagctcgccgaacgaccctgtcaccaacatttgccaagcagccgacaaacagcttttcaccctggtggagtgggccaagcggatcccacacttctcagagctgcccctggacgaccaggtcatcctgctgcgggcaggctggaatgagctgctcatcgcctccttctcccaccgctccatcgccgtgaaggacgggatcctcctggccaccgggctgcacgtccaccggaacagcgcccacagcgcaggggtgggcgccatctttgacagggtgctgacggagcttgtgtccaagatgcgggacatgcagatggacaagacggagctgggctgcctgcgcgccatcgtcctctttaaccctgactccaaggggctctcgaacccggccgaggtggaggcgctgagggagaaggtctatgcgtccttggaggcctactgcaagcacaagtacccagagcagccgggaaggttcgctaagctcttgctccgcctgccggctctgcgctccatcgggctcaaatgcctggaacatctcttcttcttcaagctcatcggggacacacccattgacaccttccttatggagatgctggaggcgccgcaccaaatgacttaggcctgcgggcccatcctttgtgcccacccgttctggccaccctgcctggacgccagctgttcttctcagcctgagccctgtccctgcccttctctgcctggcctgtttggactttggggcacagcctgtcactgctctgcctaagagatgtgttgtcaccctccttatttctgttactacttgtctgtggcccagggcagtggctttcctgaggcagcagccttcgtggcaagaactagcgtgagcccagccaggcgcctccccaccgggctctcaggacaccctgccacaccccacggggcttgggcgactacagggtcttcgggccccagccctggagctgcaggagttgggaacggggcttttgtttccgttgctgtttatcgatgctggttttcagaattcctgtgtggccctcctgtctggagtgacatcttcatctgctctgaatactggtgcccagccagcccgtgacagcttccccctaatcaggaggggacagctgggggcgcaagctggtgtgtcatcagcaaagacctcagccgcctcggggatgagaggggactcgtggggcaagcaagctgccctgtgctctgagtgagggggaaggtagcccctttttccaaagataactcacagttttgccctcgagccaatgagaacatgagctgccctctgtgcaaggtttcggggccacctccaggctgcaggggcgggtcactcacccccctgttttctctctgccttggtgttctggtttcagactcccgactccccgttcagaccagagtgccccggcccctccccagcctgagtcttctccttgctctgcggggtgggctgaggcttgtccttgtttcctgcagggctggccctggctcgggcagggtggggcatcaccacctcactggccttgctggaggcacagggctctgcggacctgcagccatctgtgaggcccgcggggatgggaggggaggagggtggcctgttggtttccctcagagggggcaggtggcctggagagagaggggctcaggaactgggagcctcgtgggtggggcagatgctccgcggcctggagtggctctgccggggcattggtgggacccctgctcaggccttctctctggctgccagttgtgtctaaaagactcttggaatctgagaacccggagtcgcagcgccctcgggcctgggccacacgcaggccctggtgggaccacccagcctggtattgtccacggacagcgttgttcacccagagccttacttgggagcctcactgaacgcctgctctggttgaaggtggggtgggggcggggcttggggcctccctggctcagcccagtgcggcctggcgctcctcccgcaggctctgcccccgggctccggtggtgcggggccctctcaggttgaactcgcctcttttgcactggaaggccctccctttggcctgagtacttttcccgttcacgcctcagtcccgtggacccagcctttgtcagtggcaggtgcctgaacagagggtggatgggggggataccggagggggtcttgtcttcccagccgcagtctaggaatgatgcgggggggtggacgccttctccatagtctttccccacctggagcaggggcttcctcagtggtgaggggagctgcctacaggttggaccgggaggcagtggcttggagaggcagctttccagccttggtggggaagaaagtgtccattctttgccttcctggagctcccagccagagctgagcttaggcacccgagtggagcctgcagctgagtctgtgcccgagacaggctgtcagagattccagaagcctctcctccccgccgccctccacccctgcctttcagcgttgtggatccctagaggtggccccctgcccgatccaccgtcctgaggcagagtgttgagcctcatacctgtaccaggtccccggccagctgggcccctcccaggcactgccaggaagccccagctgcccctggcgggtgtggtggaaatggcaggagggtgcaggtactcttggggccccagcggtgggagtgcaaaagacccaacgccaacacctggtgccttttgcagccagcgcccacccatccgtgcccggacccttgggaatgcccgcggctccagaggaaaaagcccagggacggggcctccgttgcggggggtcggctgcttcttgggaactttgtcgtttccggcgctggctggctggctggctgtaaagcactgaagccccccggccgccaacccctgaaagcagaacctggcctccctggccacagcagccttacccaccgctctacgtgtcccgggcacttcccgcagccttcccgtccctttctcatcggccttgtagttgtacagtgctgttggtttgaaaaggtgatgtgtggggagtgcggctcatcactgagtagagaggtagaatttctatttaaccagacctgtagtagtattaccaatccagttcaattaaggtgattttttgtaattattattattttggtgggacaatctttaattttctaaagatagcactaacatcagctcattagccacctgtgcctgtccccgccttggcccggctggatgaagcggcttccccgcagggcccccacttcccagtggctgcttcctggggacccagggcaccccggcaccttcaggcacgctcctcagctggtcacctcccggctttgccgttcagatggggctcctgaggctcaggagtgaagatgccacagagccgggctcccctaggctgcgtcgggcatgcttggaagctggcctgccaggaccttccaccctggggcctgtgtcagccgccggccctccgcaccctggaagcacacggcctctgggaaggacagccctgaccttcggttttccgagcacggtgtttcccaagaattctgggctggcggcctggtggcagtgctggagatgaccccgagcccctccccgtggggcacccaggagggccctgccggaatgtgcagcctgtgggtagtcggctggtgtccctgtcgtggagctggggtgcgtgatctggtgctcgtccacgcaggtgtgtggtgtaaacatgtatgtgctgtacagagagacgcgtgtggagagagccgcacaccagcgccacccaggaaaggcggagcggttaccagtgttttgtgtttatttttaatcaagacgtttcccctgttttcctataaatttgcttcgtgtaagcaagtacataaggaccctcctttggtgaaatccgggttcgaatgaatatctcaaggcaggagatgcatctattttaagatgctttggagcagacagctttagccgttcccaatccttagcaatgccttagctgggacgcatagctaatactttagagaggatgacagatccataaagagagtaaagataagagaaaatgtctaaagcatctggaaaggtaaaaaaaaaaaatctatttttgtacaaatgtaattttatccctcatgtatacttggatatggcggggggagggctgggactgtttcgtttctgcttctagagattgaggtgaaagcttcgtccgagaaacgccaggacagacgatggcagaggagagggctcctgtgacggcggcgaggcttgggaggaaaccgccgcaatgggggtgtcttccctcggggcaggagggtgggcctgaggctttcaagggttttcttccctttcgagtaatttttaaagccttgctctgttgtgtcctgttgccggctctggccttcctgtgactgactgtgaagtggcttctccgtacgattgtctctgaaacatcgtggcctcaggtgccagggtttgatggacagtagcattagaattgtggaaaaggaacacgcaaagggagaagtgtgagaggagaaacaaaatatgagcgtttaaaatacatcgccattcagttcgttaaaaaaaaaaaaaaaaaaaaaaaaa

SEQ ID NO: 70 - protein, 462 aa, Homo sapiens
MDTKHFLPLDFSTQVNSSLTSPTGRGSMAAPSLHPSLGPGIGSPGQLHSPISTLSSPINGMGPPFSVISSPMGPHSMSVPTTPTLGFSTGSPQLSSPMNPVSSSEDIKPPLGLNGVLKVPAHPSGNMASFTKHICAICGDRSSGKHYGVYSCEGCKGFFKRTVRKDLTYTCRDNKDCLIDKRQRNRCQYCRYQKCLAMGMKREAVQEERQRGKDRNENEVESTSSANEDMPVERILEAELAVEPKTETYVEANMGLNPSSPNDPVTNICQAADKQLFTLVEWAKRIPHFSELPLDDQVILLRAGWNELLIASFSHRSIAVKDGILLATGLHVHRNSAHSAGVGAIFDRVLTELVSKMRDMQMDKTELGCLRAIVLFNPDSKGLSNPAEVEALREKVYASLEAYCKHKYPEQPGRFAKLLLRLPALRSIGLKCLEHLFFFKLIGDTPIDTFLMEMLEAPHQMT

SEQ ID NO: 71 - DNA, 2892 bp, Homo sapiens
  CDS (180)...(1781): RXR beta (NR2B2)
caaagatggctgccacattggcgctgtcattttggtactgagcagagcgacgggcttaattcgacccaatccaggccagagtctttctctcaggggcttcctcgtgctcagctaatcctccgatcaatccttgggaatccctgggacctcttcggtatccctactctcagccagggatcatgtcttgggccgctcgcccgcccttcctccctcagcggcatgccgcagggcagtgtgggccggtgggggtgcgaaaagaaatgcattgtggggtcgcgtcccggtggcggcggcgacggccctggctggatcccgcagcggcggcggcggcggcggtggcaggcggagaacaacaaaccccggagccggagccaggggaggctggacgggacgggatgggcgacagcgggcgggactcccgaagcccagacagctcctccccaaatccccttccccagggagtccctcccccttctcctcctgggccacccctacccccttcaacagctccatcccttggaggctctggggccccacccccacccccgatgccaccacccccactgggctctccctttccagtcatcagttcttccatggggtcccctggtctgccccctccagctcccccaggattctccgggcctgtcagcagcccccagattaactcaacagtgtcactccctgggggtgggtctggcccccctgaagatgtgaagccaccagtcttaggggtccggggcctgcactgtccaccccctccaggtggccctggggctggcaaacggctatgtgcaatctgcggggacagaagctcaggcaaacactacggggtttacagctgtgagggttgcaagggcttcttcaaacgcaccatccgcaaagaccttacatactcttgccgggacaacaaagactgcacagtggacaagcgccagcggaaccgctgtcagtactgccgctatcagaagtgcctggccactggcatgaagagggaggcggtacaggaggagcgtcagcggggaaaggacaaggatggggatggggagggggctgggggagcccccgaggagatgcctgtggacaggatcctggaggcagagcttgctgtggaacagaagagtgaccagggcgttgagggtcctgggggaaccgggggtagcggcagcagcccaaatgaccctgtgactaacatctgtcaggcagctgacaaacagctattcacgcttgttgagtgggcgaagaggatcccacacttttcctccttgcctctggatgatcaggtcatattgctgcgggcaggctggaatgaactcctcattgcctccttctcacaccgatccattgatgttcgagatggcatcctccttgccacaggtcttcacgtgcaccgcaactcagcccattcagcaggagtaggagccatctttgatcgggtgctgacagagctagtgtccaaaatgcgtgacatgaggatggacaagacagagcttggctgcctgagggcaatcattctgtttaatccagatgccaagggcctctccaaccctagtgaggtggaggtcctgcgggagaaagtgtatgcatcactggagacctactgcaaacagaagtaccctgagcagcagggacggtttgccaagctgctgctacgtcttcctgccctccggtccattggccttaagtgtctagagcatctgtttttcttcaagctcattggtgacacccccatcgacaccttcctcatggagatgcttgaggctccccatcaactggcctgagctcagacccagacgtggtgcttctcacactggaggagcacacatccaagagggactccaagccctggggcagggtggggggccatgttcccagaaccttgatggggtgagaagtacagggcagaaccaagaacataaaccctccaagggatctgcttgatatcccaagttggaagggaccccagatacctgtgaggactggttgtctctcttcggtggccttgagtctctgaatttgtcgggttctcccatgatttggggtgatttctcaccctctgtccttcccccagcacaaagcactggccttgcctccaggaccttgcttccttctcatcttgcctcattttgcttcccatctgaagagtggaaatggggaactcccccagaggtggatactggggggcaggcctcccaagctgatggacatgagagtagggccctgacaggccttcctcctctcaaacctggcagatgggggcctctctggaagagggaggggccctgtcactgtccagagtctctttttacacttcacctccttctgcagtcagactgaaatataaaaaaggtggtggtggtggtgaaggggctggtggagatgtaggaaccgatctgctatttttaatttcctgtgaggatagagacttgcagttagactcaaagaagtactgtactttcccaggttgactaagaaatgccagtggtggaggtgggtgtttgggaaaggcagggccctgaaatggcctgtccctagggctctccaagcactagccttcccagcttcccgccgccccccctatctcttcctgtctaacttggggaaggggcctgggctgtgaggacagggcccccacaggggatggtttcacgagtgtagtcccggaggccttccctttacagctctcctccagccctgggcacatagcataggctggggacacaggatcctggcctgagaattgaggggaggtggccagcccgcagaggtggggtgctggggctgcatgatttttgccctgcgtcccttctctttggggctcctttcccctctcatacataaaatcgctttcaaattaaaatcgctgttttctggaaaaaaaaaaaaaaaaaa

SEQ ID NO: 72 - protein, 533 aa, Homo sapiens
MSWAARPPFLPQRHAAGQCGPVGVRKEMHCGVASRWRRRRPWLDPAAAAAAAVAGGEQQTPEPEPGEAGRDGMGDSGRDSRSPDSSSPNPLPQGVPPPSPPGPPLPPSTAPSLGGSGAPPPPPMPPPPLGSPFPVISSSMGSPGLPPPAPPGFSGPVSSPQINSTVSLPGGGSGPPEDVKPPVLGVRGLHCPPPPGGPGAGKRLCAICGDRSSGKHYGVYSCEGCKGFFKRTIRKDLTYSCRDNKDCTVDKRQRNRCQYCRYQKCLATGMKREAVQEERQRGKDKDGDGEGAGGAPEEMPVDRILEAELAVEQKSDQGVEGPGGTGGSGSSPNDPVTNICQAADKQLFTLVEWAKRIPHFSSLPLDDQVILLRAGWNELLIASFSHRSIDVRDGILLATGLHVHRNSAHSAGVGAIFDRVLTELVSKMRDMRMDKTELGCLRAIILFNPDAKGLSNPSEVEVLREKVYASLETYCKQKYPEQQGRFAKLLLRLPALRSIGLKCLEHLFFFKLIGDTPIDTFLMEMLEAPHQLA

SEQ ID NO: 73 - DNA, 1742 bp, Homo sapiens
  CDS (189)...(1580): RXR gamma (NR2B3)
ctccgatctagaggcagattcctgactaatcccagagggctggcccagcctgtgctccccgggctgctaggaagcgatgaccactcttgttagcccaagttgaagaaagccgggctgtgcctgggagccgagagaggcggtaatatttagaagctgcacaggagaggaacatgaactgacgagtaaacatgtatggaaattattctcacttcatgaagtttcccgcaggctatggaggctcccctggccacactggctctacatccatgagcccatcagcagccttgtccacagggaagccaatggacagccaccccagctacacagataccccagtgagtgccccacggactctgagtgcagtggggacccccctcaatgccctgggctctccatatcgagtcatcacctctgccatgggcccaccctcaggagcacttgcagcgcctccaggaatcaacttggttgccccacccagctctcagctaaatgtggtcaacagtgtcagcagttcagaggacatcaagcccttaccagggcttcccgggattggaaacatgaactacccatccaccagccccggatctctggttaaacacatctgtgccatctgtggagacagatcctcaggaaagcactacggggtatacagttgtgaaggctgcaaagggttcttcaagaggacgataaggaaggacctcatctacacgtgtcgggataataaagactgcctcattgacaagcgtcagcgcaaccgctgccagtactgtcgctatcagaagtgccttgtcatgggcatgaagagggaagctgtgcaagaagaaagacagaggagccgagagcgagctgagagtgaggcagaatgtgctaccagtggtcatgaagacatgcctgtggagaggattctagaagctgaacttgctgttgaaccaaagacagaatcctatggtgacatgaatatggagaactcgacaaatgaccctgttaccaacatatgtcatgctgctgacaagcagcttttcaccctcgttgaatgggccaagcgtattccccacttctctgacctcaccttggaggaccaggtcattttgcttcgggcagggtggaatgaattgctgattgcctctttctcccaccgctcagtttccgtgcaggatggcatccttctggccacgggtttacatgtccaccggagcagtgcccacagtgctggggtcggctccatctttgacagagtcctaactgagctggtttccaaaatgaaagacatgcagatggacaagtcggaactgggatgcctgcgagccattgtactctttaacccagatgccaagggcctgtccaacccctctgaggtggagactctgcgagagaaggtttatgccacccttgaggcctacaccaagcagaagtatccggaacagccaggcaggtttgccaagctgctgctgcgcctcccagctctgcgttccattggcttgaaatgcctggagcacctcttcttcttcaagctcatcggggacacccccattgacaccttcctcatggagatgttggagaccccgctgcagatcacctgagccccaccagccacagcctccccacccaggatgacccctgggcaggtgtgtgtggacccccaccctgcactttcctccacctcccaccctgacccccttcctgtccccaaaatgtgatgcttataataaagaaaacctttctacaaaaaaaaaaaaaaaaaa

SEQ ID NO: 74 - protein, 463 aa, Homo sapiens
MYGNYSHFMKFPAGYGGSPGHTGSTSMSPSAALSTGKPMDSHPSYTDTPVSAPRTLSAVGTPLNALGSPYRVITSAMGPPSGALAAPPGINLVAPPSSQLNVVNSVSSSEDIKPLPGLPGIGNMNYPSTSPGSLVKHICAICGDRSSGKHYGVYSCEGCKGFFKRTIRKDLIYTCRDNKDCLIDKRQRNRCQYCRYQKCLVMGMKREAVQEERQRSRERAESEAECATSGHEDMPVERILEAELAVEPKTESYGDMNMENSTNDPVTNICHAADKQLFTLVEWAKRIPHFSDLTLEDQVILLRAGWNELLIASFSHRSVSVQDGILLATGLHVHRSSAHSAGVGSIFDRVLTELVSKMKDMQMDKSELGCLRAIVLFNPDAKGLSNPSEVETLREKVYATLEAYTKQKYPEQPGRFAKLLLRLPALRSIGLKCLEHLFFFKLIGDTPIDTFLMEMLETPLQIT

SEQ ID NO: 75 - DNA, 2202 bp, Homo sapiens
  CDS (57)...(1868): TR2 alpha (NR2C1)
gggactgtcgcgtcggcgcccgacgcggagtcagcaggggcgaaaagcggtagatcatggcaaccatagaagaaattgcacatcaaattattgaacaacagatgggagagattgttacagagcagcaaactgggcagaaaatccagattgtgacagcacttgatcataatacccaaggcaagcagttcattctgacaaatcacgacggctctactccaagcaaagtcattctggccaggcaagattccactccgggaaaagttttccttacaactccagatgcagcaggtgtcaaccagttattttttaccactcctgatctgtctgcacaacacctgcagctcctaacagataattctccagaccaaggaccaaataaggtttttgatctttgcgtagtatgtggagacaaagcatcaggacgtcattatggagcagtaacttgtgaaggctgcaaaggattttttaaaagaagcatccgaaaaaatttagtatattcatgtcgaggatcaaaggattgtattattaataagcaccaccgaaaccgctgtcaatactgcaggttacagagatgtattgcgtttggaatgaagcaagactctgtccaatgtgaaagaaaacccattgaagtatcacgagaaaaatcttccaactgtgccgcttcaacagaaaaaatctatatccgaaaggaccttcgtagcccattaactgcaactccaacttttgtaacagatagtgaaagtacaaggtcaacaggactgttagattcaggaatgttcatgaatattcatccatctggagtaaaaactgagtcagctgtgctgatgacatcagataaggctgaatcatgtcagggagatttaagtacattggccaatgtggttacatcattagcgaatcttggaaaaactaaagatctttctcaaaatagtaatgaaatgtctatgattgaaagcttaagcaatgatgatacctctttgtgtgaatttcaagaaatgcagaccaacggtgatgtttcaagggcatttgacactcttgcaaaagcattgaatcctggagagagcacagcctgccagagctcagtagcgggcatggaaggaagtgtacacctaatcactggagattcaagcataaattacaccgaaaaagaggggccacttctcagcgattcacatgtagctttcaggctcaccatgccttctcctatgcctgagtacctgaatgtgcactacattggggagtctgcctccagactgctgttcttatcaatgcactgggcactttcgattccttctttccaggctctagggcaagaaaacagcatatcactggtgaaagcttactggaatgaactttttactcttggtcttgcccagtgctggcaagtgatgaatgtagcaactatattagcaacatttgtcaattgtcttcacaatagtcttcaacaagataaaatgtcaacagaaagaagaaaattattgatggagcacatcttcaaactacaggagttttgtaacagcatggttaaactctgcattgatggatacgaatatgcctacctgaaggcaatagtactcttcagtccagatcatccaagcctagaaaacatggaactgatagagaaatttcaggaaaaggcttatgtggaattccaagattatataaccaaaacatatccagatgacacctacaggttatccagactactactcagattgccagctttaagactgatgaatgctaccatcactgaagaattgtttttcaaaggtctcattggcaatatacgaattgacagtgttatcccacatattttgaaaatggagcctgcagattataactctcaaataattggtcacagcatttgaaaactgtgactgcagtgctgtaaacttaactgttctttgccagaacacaagacaccaaattgaactcactgcttttgaggcatctggaaatttttactttaaaaagtaaccagaatccaaggtatttttattttagcttcccttaagaatttttgaagtgactgggcaggcagcagaaattaaatgaatttttcttcctgattcctttaaatgaatatgaaacactacaaatttattcttggtgaagatgatacctgaagctgtcacctcttgattatctaaactaagcgctcattctattttataaaacaaataaattagtctcttttttctg

SEQ ID NO: 76 - protein, 603 aa, Homo sapiens
MATIEEIAHQIIEQQMGEIVTEQQTGQKIQIVTALDHNTQGKQFILTNHDGSTPSKVILARQDSTPGKVFLTTPDAAGVNQLFFTTPDLSAQHLQLLTDNSPDQGPNKVFDLCVVCGDKASGRHYGAVTCEGCKGFFKRSIRKNLVYSCRGSKDCIINKHHRNRCQYCRLQRCIAFGMKQDSVQCERKPIEVSREKSSNCAASTEKIYIRKDLRSPLTATPTFVTDSESTRSTGLLDSGMFMNIHPSGVKTESAVLMTSDKAESCQGDLSTLANVVTSLANLGKTKDLSQNSNEMSMIESLSNDDTSLCEFQEMQTNGDVSRAFDTLAKALNPGESTACQSSVAGMEGSVHLITGDSSINYTEKEGPLLSDSHVAFRLTMPSPMPEYLNVHYIGESASRLLFLSMHWALSIPSFQALGQENSISLVKAYWNELFTLGLAQCWQVMNVATILATFVNCLHNSLQQDKMSTERRKLLMEHIFKLQEFCNSMVKLCIDGYEYAYLKAIVLFSPDHPSLENMELIEKFQEKAYVEFQDYITKTYPDDTYRLSRLLLRLPALRLMNATITEELFFKGLIGNIRIDSVIPHILKMEPADYNSQIIGHSI

SEQ ID NO: 77 - DNA, 2416 bp, Homo sapiens
  CDS (216)...(2063): TR2 beta (NR2C2)
ccgctcccacctcggcgtctcgtctctcgcccgctgccccgcgagcccgcggcccccggctcccgccatccgccgacaccgggagcccgggctccccgcgccctgccctccgcgccgggggccgcccgccgcagacacgggacccgcttcgaggccgctttggcgcaaatcctgaggtaacacgtacacagacctctcggccggaatctccagggatgaccagcccctccccacgcatccagataatctccaccgactctgctgtagcctcacctcagcgcattcagggctctgaacctgcctctggcccattgagtgttttcacatctttgaacaaagagaagattgtcacagaccagcagacaggacagaaaatccagatagtcaccgcagtggacgcctccggatcccccaaacagcagttcatcctgaccagcccagatggagctggaactgggaaggtgatcctggcttccccagagacatccagcgccaagcaactcatattcaccacctcagacaacctcgtccctggcaggatccagattgtcacggattctgcctctgtggagcgtttactggggaagacggacgtccagcggccccaggtggtagagtactgtgtggtctgtggcgacaaagcctccggccgtcactatggggctgtcagttgtgaaggttgcaaaggtttcttcaaaaggagtgtgaggaaaaatttgacctacagctgccggagcaaccaagactgcatcatcaataaacatcaccggaaccgctgtcagttttgccggctgaaaaaatgcttagagatgggcatgaaaatggaatctgtgcagagtgaacggaagcccttcgatgtgcaacgggagaaaccaagcaattgtgctgcttcaactgagaaaatctatatccggaaagacctgagaagtcccctgatagctactcccacgtttgtggcagacaaagatggagcaagacaaacaggtcttcttgatccagggatgcttgtgaacatccagcagcctttgatacgtgaggatggtacagttctcctggccacggattctaaggctgaaacaagccagggagctctgggcacactggcaaatgtagtgacctcccttgccaacctaagtgaatctttgaacaacggtgacacttcagaaatccagccagaggaccagtctgcaagtgagataactcgggcatttgataccttagctaaagcacttaataccacagacagctcctcttctccaagcttggcagatgggatagacaccagtggaggagggagcatccacgtcatcagcagagaccagtcgacacccatcattgaggttgaaggccccctcctttcagacacacacgtcacatttaagctaacaatgcccagtccaatgccagagtacctcaacgtgcactacatctgtgagtctgcatcccgtctgcttttcctctcaatgcactgggctcggtcaatcccagcctttcaggcacttgggcaggactgcaacaccagccttgtgcgggcctgctggaatgagctcttcaccctcggcctggcccagtgtgcccaggtcatgagtctctccaccatcctggctgccattgtcaaccacctgcagaacagcatccaggaagataaactttctggtgaccggataaagcaagtcatggagcacatctggaagctgcaggagttctgtaacagcatggcgaagctggatatagatggctatgagtatgcataccttaaagctatagttctctttagccccgatcatccaggtttgaccagcacaagccagattgaaaaattccaagaaaaggcacagatggagttgcaggactatgttcagaaaacctactcagaagacacctaccgattggcccggatcctcgttcgcctgccggcactcaggctgatgagctccaacataacagaagaacttttttttactggtctcattggcaatgtttcgatagacagcataatcccctacatcctcaagatggagacagcagagtataatggccagatcaccggagccagtctatagcgcaaaccacacacctgccaaggagcaacagaatccttccaggaccgttcacatacaaagaaaagtagtggtattttggtatgtgcaaatatttccatatgttagccatttcctgtctggtttctccttatctgttaatcccagacaatagcaattaaaagactagtaggatcctttcctgacataagaaatgttttaatgccttttgatgaagcagcagattttggaacaatcttttaactcaatttgtatttagaaattctcaaagggcaaaaaacaaaaaaaaaggttttataatgtcagagactagtattaaagaaaactgaaagaacctgaaaaaaaaaaaaaaaaaa

SEQ ID NO: 78 - protein, 615 aa, Homo sapiens
MTSPSPRIQIISTDSAVASPQRIQGSEPASGPLSVFTSLNKEKIVTDQQTGQKIQIVTAVDASGSPKQQFILTSPDGAGTGKVILASPETSSAKQLIFTTSDNLVPGRIQIVTDSASVERLLGKTDVQRPQVVEYCVVCGDKASGRHYGAVSCEGCKGFFKRSVRKNLTYSCRSNQDCIINKHHRNRCQFCRLKKCLEMGMKMESVQSERKPFDVQREKPSNCAASTEKIYIRKDLRSPLIATPTFVADKDGARQTGLLDPGMLVNIQQPLIREDGTVLLATDSKAETSQGALGTLANVVTSLANLSESLNNGDTSEIQPEDQSASEITRAFDTLAKALNTTDSSSSPSLADGIDTSGGGSIHVISRDQSTPIIEVEGPLLSDTHVTFKLTMPSPMPEYLNVHYICESASRLLFLSMHWARSIPAFQALGQDCNTSLVRACWNELFTLGLAQCAQVMSLSTILAAIVNHLQNSIQEDKLSGDRIKQVMEHIWKLQEFCNSMAKLDIDGYEYAYLKAIVLFSPDHPGLTSTSQIEKFQEKAQMELQDYVQKTYSEDTYRLARILVRLPALRLMSSNITEELFFTGLIGNVSIDSIIPYILKMETAEYNGQITGASL

SEQ ID NO: 79 - DNA, 3225 bp, Homo sapiens
  CDS (708)...(1865): TLX (NR2E1)
ggagatattacaggggacccagcccgcagcgacaggcacaaagtcacggggtaatgaacttcggggacccttcgccgctgcgtgcgcggctctccccggaaacccggacctggccgcctcttccctcggaagatttcccagcaatctagttttcccactctgcgcttgggttccggcagcgcggagcccgtctgcctctgagactgcggtagtgttttccttctttccttgggagaccagcggtcggcagagattgcccacactctgcatgcctatgtagagggagagatcgaagactgagtgacaggaatggggaaaaagagggatttcgctccgtaggaaggccattttcgtgtctccatctctgtctttcaacatccctctcttgctgttcttccttcttcctcagtcttcctgtccatctctccatctgtctgtccatgtgtgtgtccatatcaagcagcattcccagcagctgcggttttgcaagagccgggaagaaacttaaggatgcttaaatttccactgttggacgaattctgagcgcccagggagcagcgcagcgcgcgactgacacccacctgtcccgcccaggagccttgcaggctggagggcggctggagagcggcggcgccggcggcgaggcgggcgctgccggccgggactcgggcagcgcccaccaaccgctccgccccgggacagccagcatgagcaagccagccggatcaacaagccgcattttagatatcccctgcaaagtgtgtggcgaccgcagctcggggaagcactacggggtctacgcctgcgacggctgctcaggttttttcaaacggagcatccgaaggaataggacctatgtctgcaaatctggaaaccagggaggctgtccggtggacaagacgcacagaaaccagtgcagggcgtgtcggctgaagaagtgtttggaagtcaacatgaacaaagacgccgtgcagcacgagcgggggcctcggacgtccaccatccgcaagcaagtggccctctacttccgtggacacaaggaggagaacggggccgccgcgcactttccctcggcggcgctccctgcgccggccttcttcaccgcggtcacgcagctggagccgcacggcctggagctggccgcggtgtccaccactccagagcggcagaccctcgtgagcctggctcagcccacgcccaagtacccccatgaagtgaatgggaccccaatgtatctctatgaagtggccacggagtcggtgtgtgaatcagctgccagacttctcttcatgagcatcaagtgggctaagagtgtgccagccttctccacgctgtctttgcaagaccagctgatgcttttggaagatgcttggagagaactgtttgttctaggaatagcacaatgggccattccggttgatgctaacactctactggctgtatctggcatgaacggtgacaacacagattcccagaagctgaacaagatcatatctgaaatacaggctttacaagaggtggtggctcgatttagacaactccggttagatgctactgaatttgcctgtctaaaatgcatcgtcactttcaaagccgttcctacacatagtggttctgaactgagaagtttccggaatgctgccgccattgcagcccttcaagatgaggctcagctaacgctcaacagctacatccataccagatatcccactcaaccctgtcgctttggaaaactcctgttgcttttgccagctttacgttctattagcccatcaactatagaagaagtgtttttcaaaaaaaccatcggcaatgtgccaattacaagactgctttcagatatgtacaaatccagtgatatctaagctcacaagatacccacttttcaggatgggacagtatcagatgaacttcaacccatggagaacaagcctcaactaacaaacccttcaggaagcatataccggggaatgtgtagccttcaggaaaaaaatgccaattgacacaaagcattccagtagctatgacctgccgccctgaccaggatagggcgggtgggaaggagaggggtgcaacaggaccgcctgcactgaaaactcactgctgccatgccctgggagggggcaaactgggggttgccacaggccgtgccattctgcctcttacctggaagatcaggctgaacgatcaaaagctgaaacataagtagtgctttctcttcctttttagcatacaaagtttggtaaccaaatatagctctgtgtataacatcgtactgcggccttcaaaactacgttatgttggagcatttattttaaaaataatggtaggttttaaattaaaagtgttatcaaaagtttcccctctattgtaatacattattaagtggccttcagaactgagttaataagtgaaaagtagcttatgccatgtgatttgctttttctctatcttcttttttcttttctttctctttcttttgttctttcttcttcttttttaataccataggccaggcaaccttgtcaaaggaattgatggacaaaatgagattctcaccaggacttcaggttggataacatgtcaaaaagagaagagctttactaaaagaacataagtcaagggaggatgaataaaaacagcaaaaccaaataaagtggagatgagtgattgagtgaggtagattgctgtcccgttaacatagtgctgaaaccaaaggcagtgggggtccaaactcgtggtgcagcaagtcacaccagacaggaaacgaatatggacgtaattgcagaaggaacttcaaggagatgaatgaatgctaaaagggttcttgactgatccattgctaacagcctgagactcttcaatgcctttccgaaaactggtttctagtaaagccttgaatgaacacacacacacacacacacacacacacacacacacacacacacacacacaccgtcctacactttaagctgctcctttggtatgactctatacttatggaaatgtagaaacaaacatttttaaatagctgctgtacttttcacattttgatttattaggtactagcactgaggaaaaaaaattcagcacttggactatcataggatgagtaaaacttttcttgtacaaagtgaattaactgatttgtgaagttaaaaggttgtactcattgtatttacaaagaataaaaatatattgaatttaaatgaaaaaaaaaaaaaa

SEQ ID NO: 80 - protein, 385 aa, Homo sapiens
MSKPAGSTSRILDIPCKVCGDRSSGKHYGVYACDGCSGFFKRSIRRNRTYVCKSGNQGGCPVDKTHRNQCRACRLKKCLEVNMNKDAVQHERGPRTSTIRKQVALYFRGHKEENGAAAHFPSAALPAPAFFTAVTQLEPHGLELAAVSTTPERQTLVSLAQPTPKYPHEVNGTPMYLYEVATESVCESAARLLFMSIKWAKSVPAFSTLSLQDQLMLLEDAWRELFVLGIAQWAIPVDANTLLAVSGMNGDNTDSQKLNKIISEIQALQEVVARFRQLRLDATEFACLKCIVTFKAVPTHSGSELRSFRNAAAIAALQDEAQLTLNSYIHTRYPTQPCRFGKLLLLLPALRSISPSTIEEVFFKKTIGNVPITRLLSDMYKSSDI

SEQ ID NO: 81 - DNA, 2102 bp, Homo sapiens
  CDS (191)...(1294): PNR (NR2E3) variant 1
agaaatctcctcaagccagagcctgtgctgtgaggggcttcgggaccttggggcagctcctgagttcagacagagttcaggaagggagacaggggcacagagagacagaggttcatggactgaggcaaaggctgggccaggctcagcaacccaggcctcccgcaggcaggcagaggctgccctgtaacccatggagaccagaccaacagctctgatgagctccacagtggctgcagctgcgcctgcagctggggctgcctccaggaaggagtctccaggcagatggggcctgggggaggatcccacaggcgtgagcccctcgctccagtgccgcgtgtgcggagacagcagcagcgggaagcactatggcatctatgcctgcaacggctgcagcggcttcttcaagaggagcgtacggcggaggctcatctacaggtgccaggtgggggcagggatgtgccccgtggacaaggcccaccgcaaccagtgccaggcctgccggctgaagaagtgcctgcaggcggggatgaaccaggacgccgtgcagaacgagcgccagccgcgaagcacagcccaggtccacctggacagcatggagtccaacactgagtcccggccggagtccctggtggctcccccggccccggcagggcgcagcccacggggccccacacccatgtctgcagccagagccctgggccaccacttcatggccagccttataacagctgaaacctgtgctaagctggagccagaggatgctgatgagaatattgatgtcaccagcaatgaccctgagttcccctcctctccatactcctcttcctccccctgcggcctggacagcatccatgagacctcggctcgcctactcttcatggccgtcaagtgggccaagaacctgcctgtgttctccagcctgcccttccgggatcaggtgatcctgctggaagaggcgtggagtgaactctttctcctcggggccatccagtggtctctgcctctggacagctgtcctctgctggcaccgcccgaggcctctgctgccggtggtgcccagggccggctcacgctggccagcatggagacgcgtgtcctgcaggaaactatctctcggttccgggcattggcggtggaccccacggagtttgcctgcatgaaggccttggtcctcttcaagccagagacgcggggcctgaaggatcctgagcacgtagaggccttgcaggaccagtcccaagtgatgctgagccagcacagcaaggcccaccaccccagccagcccgtgaggtgacctgagcatgcgcccacccactcatctgtccctgacctctaacctttctctgcctctcccacactctcccagagctcactgattagacagcacaagggtctcagttcaacagcatacagccaacatctatggtgtcccaggcacagtgccaggccccgggagtggggaccaagatgtacataagacaaagctactgccttctagagacaaccggcagtgacctcactgaagacaaaaactgccctagccaggtactgagggttgcatgaatctgcaggagacagagatccccttgcatgggaaacataaagcagaattgggagggactttgtggagacagggctggacttgaaaggaagaagaagtctaaaagaaaacatcatttgcaaagggagagaggggcaagcatgatatgttgttagaacaggagcccactttgaaggtataacaggttcctgccagtgagaaatggggagaataagccagaaaagtaccctaggaccagcccgttcaggactttgaatgccagccaaaggccacgtctgacttgggaggcagagggcagctactgcaggtttccgagcagagggtcatacacagggctggacctcacgcagactggcatggccatgggtccagaggatactactgggaaggggatggcagctactgccaccttccagatggttccatggagttctgatctttgggcatggccaggggaagcagaagggagactctaggagttgaaatgggtcagacccggtgtttgggtgaaggtaaggaatgagggaagaggagctctttg

SEQ ID NO: 82 - protein, 367 aa, Homo sapiens
METRPTALMSSTVAAAAPAAGAASRKESPGRWGLGEDPTGVSPSLQCRVCGDSSSGKHYGIYACNGCSGFFKRSVRRRLIYRCQVGAGMCPVDKAHRNQCQACRLKKCLQAGMNQDAVQNERQPRSTAQVHLDSMESNTESRPESLVAPPAPAGRSPRGPTPMSAARALGHHFMASLITAETCAKLEPEDADENIDVTSNDPEFPSSPYSSSSPCGLDSIHETSARLLFMAVKWAKNLPVFSSLPFRDQVILLEEAWSELFLLGAIQWSLPLDSCPLLAPPEASAAGGAQGRLTLASMETRVLQETISRFRALAVDPTEFACMKALVLFKPETRGLKDPEHVEALQDQSQVMLSQHSKAHHPSQPVR

SEQ ID NO: 83 - DNA, 1999 bp, Homo sapiens
  CDS (191)...(1423): PNR (NR2E3) variant 2
agaaatctcctcaagccagagcctgtgctgtgaggggcttcgggaccttggggcagctcctgagttcagacagagttcaggaagggagacaggggcacagagagacagaggttcatggactgaggcaaaggctgggccaggctcagcaacccaggcctcccgcaggcaggcagaggctgccctgtaacccatggagaccagaccaacagctctgatgagctccacagtggctgcagctgcgcctgcagctggggctgcctccaggaaggagtctccaggcagatggggcctgggggaggatcccacaggcgtgagcccctcgctccagtgccgcgtgtgcggagacagcagcagcgggaagcactatggcatctatgcctgcaacggctgcagcggcttcttcaagaggagcgtacggcggaggctcatctacaggtgccaggtgggggcagggatgtgccccgtggacaaggcccaccgcaaccagtgccaggcctgccggctgaagaagtgcctgcaggcggggatgaaccaggacgccgtgcagaacgagcgccagccgcgaagcacagcccaggtccacctggacagcatggagtccaacactgagtcccggccggagtccctggtggctcccccggccccggcagggcgcagcccacggggccccacacccatgtctgcagccagagccctgggccaccacttcatggccagccttataacagctgaaacctgtgctaagctggagccagaggatgctgatgagaatattgatgtcaccagcaatgaccctgagttcccctcctctccatactcctcttcctccccctgcggcctggacagcatccatgagacctcggctcgcctactcttcatggccgtcaagtgggccaagaacctgcctgtgttctccagcctgcccttccgggatcaggtgatcctgctggaagaggcgtggagtgaactctttctcctcggggccatccagtggtctctgcctctggacagctgtcctctgctggcaccgcccgaggcctctgctgccggtggtgcccagggccggctcacgctggccagcatggagacgcgtgtcctgcaggaaactatctctcggttccgggcattggcggtggaccccacggagtttgcctgcatgaaggccttggtcctcttcaagccagagacgcggggcctgaaggatcctgagcacgtagaggccttgcaggaccagtcccaagtgatgctgagccagcacagcaaggcccaccaccccagccagcccgtgaggtttgggaaattgctcctgctcctcccgtctttgaggtttatcactgcggaacgcatcgagctcctctttttccgcaagaccatagggaatactccaatggagaagctcctttgtgatatgttcaaaaactagtgggggtggaggtgaaatgtttccaagcactctggaaaacaatctactgaaacgaaacatttgcctactctttgccccagcaattcctcgtaggtgtgtgtacccagcagaaatgcccaccgaaagatattgtaagaatattcatagcagctttattcataatagccccaaactgtatattgatggtaggatgaattaacaagttgtggtatattcatataatgaaaaataatttaaaaagaatgaattacggatacatgtggcaacacaggtaaacttcacagacataaaagttgaatgaaagaagccaggccgaagttccatttatgcagagttcaggaacaggcaagactaattgacaataatagaagttggaatagtggttacttctgggtggtgggggattgatacagagggggctcatgggagccctctggtgtaccagaaatgttgattttgatctgggcagtggtttcacaaatgtattcatacgtaataattcattgagctgtgcactttattttgttagacctcaataaaaaagtaaaaaaaaaaaacaaaaaaaaccagaaaaaa

SEQ ID NO: 84 - protein, 410 aa, Homo sapiens
METRPTALMSSTVAAAAPAAGAASRKESPGRWGLGEDPTGVSPSLQCRVCGDSSSGKHYGIYACNGCSGFFKRSVRRRLIYRCQVGAGMCPVDKAHRNQCQACRLKKCLQAGMNQDAVQNERQPRSTAQVHLDSMESNTESRPESLVAPPAPAGRSPRGPTPMSAARALGHHFMASLITAETCAKLEPEDADENIDVTSNDPEFPSSPYSSSSPCGLDSIHETSARLLFMAVKWAKNLPVFSSLPFRDQVILLEEAWSELFLLGAIQWSLPLDSCPLLAPPEASAAGGAQGRLTLASMETRVLQETISRFRALAVDPTEFACMKALVLFKPETRGLKDPEHVEALQDQSQVMLSQHSKAHHPSQPVRFGKLLLLLPSLRFITAERIELLFFRKTIGNTPMEKLLCDMFKN

SEQ ID NO: 85 - DNA, 1658 bp, Homo sapiens
  CDS (89)...(1360): COUP-TF alpha (NR2F1)
cttccccttcccctcccagcgcgcccgcgcgccccgcggccctcggcgagcagctcggctccccccagcgctccccgggcccaaagatatggcaatggtagttagcagctggcgagatccgcaggacgacgtggccgggggcaaccccggcggccccaaccccgcagcgcaggcggcccgcggcggcggcggcggcgccggcgagcagcagcagcaggcgggctcgggcgcgccgcacacgccgcagaccccgggccagcccggagcgcccgccacccccggcacggcgggggacaagggccagggcccgcccggttcgggccagagccagcagcacatcgagtgcgtggtgtgcggggacaagtcgagcggcaagcactacggccaattcacctgcgagggctgcaaaagtttcttcaagaggagcgtccgcaggaacttaacttacacatgccgtgccaacaggaactgtcccatcgaccagcaccaccgcaaccagtgccaatactgccgcctcaagaagtgcctcaaagtgggcatgaggcgggaagcggttcagcgaggaagaatgcctccaacccagcccaatccaggccagtacgcactcaccaacggggaccccctcaacggccactgctacctgtccggctacatctcgctgctgctgcgcgccgagccctaccccacgtcgcgctacggcagccagtgcatgcagcccaacaacattatgggcatcgagaacatctgcgagctggccgcgcgcctgctcttcagcgccgtcgagtgggcccgcaacatccccttcttcccggatctgcagatcaccgaccaggtgtccctgctacgcctcacctggagcgagctgttcgtgctcaacgcggcccagtgctctatgccgctgcacgtggcgccgttgctggccgccgccggcctgcatgcctcgcccatgtctgccgaccgcgtcgtggccttcatggaccacatccgcatcttccaggagcaggtggagaagctcaaggcgctacacgtcgactcagccgagtacagctgcctcaaagccatcgtgctgttcacgtcagacgcctgtggcctgtcggatgcggcccacatcgagagcctgcaggagaagtcgcagtgcgcactggaggagtacgtgaggagccagtaccccaaccagcccagccgttttggcaaactgctgctgcgactgccctcgctgcgcaccgtgtcctcctccgtcatcgagcagctcttcttcgtccgtttggtaggtaaaacccccatcgaaactctcatccgcgatatgttactgtctgggagcagcttcaactggccttacatgtccatccagtgctcctagaccttgggcgcttcccacctgccccgtccccctagagactcagaggacccacctgggccaaggactccaaagccgcggggacaccgggaagtgcagcgggccaggcaggctgggtgggagggaggagggccgagacaggagcagcccacccagcagaaatacaatccgagctacaaagcatgggaaaaagagactcttttaggatcagatctgtgagcacgttggcgaggaaaaacaaaacaaacaaaaaaaagaaccttgtgtctgtctggtgaaaaaaaaaaaaaaaaaaaaaaaa

SEQ ID NO: 86 - protein, 423 aa, Homo sapiens
MAMVVSSWRDPQDDVAGGNPGGPNPAAQAARGGGGGAGEQQQQAGSGAPHTPQTPGQPGAPATPGTAGDKGQGPPGSGQSQQHIECVVCGDKSSGKHYGQFTCEGCKSFFKRSVRRNLTYTCRANRNCPIDQHHRNQCQYCRLKKCLKVGMRREAVQRGRMPPTQPNPGQYALTNGDPLNGHCYLSGYISLLLRAEPYPTSRYGSQCMQPNNIMGIENICELAARLLFSAVEWARNIPFFPDLQITDQVSLLRLTWSELFVLNAAQCSMPLHVAPLLAAAGLHASPMSADRVVAFMDHIRIFQEQVEKLKALHVDSAEYSCLKAIVLFTSDACGLSDAAHIESLQEKSQCALEEYVRSQYPNQPSRFGKLLLRLPSLRTVSSSVIEQLFFVRLVGKTPIETLIRDMLLSGSSFNWPYMSIQCS

SEQ ID NO: 87 - DNA, 3049 bp, Homo sapiens
  CDS (582)...(1826): COUP-TF beta (NR2F2)
agccccggcgcctataaatcgcattccctcccgcgcccccctttttagcatatttgatcactttgattctctgttcttttctctccgcggtgtgtgtgtgcgtgcgcgcgtgtgtgttttcttcttctcctcctcctctccccgagttgcctcctttctccgggtgccgtactgccttttttcccctctttcattctttctctccgtctttttctcccccctctgcgcacgaaggatgtgcttctaggtggtgatctgccctcctctctctcttttatcatttctcccccgccgccggcgagttgactctttccctatgtgtgtgaggcggcggcggcagcagcagcagcagcggctccggcggcggcagcagcggcagcagcgacttcagcggcggcggcggcgctagacgcagcggctccgggcccgacccggcggcttcggggcgccctcccgcgccctcttgcaccctcgcacacacaaaaggcggcgcgccggagcccgagacccggggagccgccgccgccccgccgccgcccgcagccaggggagcaggaagtccggacgcagcccccatagatatggcaatggtagtcagcacgtggcgcgacccccaggacgaggtgcccggctcacagggcagccaggcctcgcaggcgccgcccgtgcccggcccgccgcccggcgccccgcacacgccacagacgcccggccaagggggcccagccagcacgccagcccagacggcggccggtggccagggcggccctggcggcccgggtagcgacaagcagcagcagcagcaacacatcgagtgcgtggtgtgcggagacaagtcgagcggcaagcactacggccagttcacgtgcgagggctgcaagagcttcttcaagcgcagcgtgcggaggaacctgagctacacgtgccgcgccaaccggaactgtcccatcgaccagcaccatcgcaaccagtgccagtactgccgcctcaaaaagtgcctcaaagtgggcatgagacgggaagcggtgcagaggggcaggatgccgccgacccagccgacccacgggcagttcgcgctgaccaacggggatcccctcaactgccactcgtacctgtccggatatatttccctgctgttgcgcgcggagccctatcccacgtcgcgcttcggcagccaatgcatgcagcccaacaacatcatgggtatcgagaacatttgcgaactggccgcgaggatgctcttcagcgccgtcgagtgggcccggaacatccccttcttccccgacctgcagatcacggaccaggtggccctgcttcgcctcacctggagcgagctgtttgtgttgaatgcggcgcagtgctccatgcccctccacgtcgccccgctcctggccgccgccggcctgcatgcttcgcccatgtccgccgaccgggtggtcgcctttatggaccacatacggatcttccaagagcaagtggagaagctcaaggcgctgcacgttgactcagccgagtacagctgcctcaaggccatagtcctgttcacctcagatgcctgtggtctctctgatgtagcccatgtggaaagcttgcaggaaaagtctcagtgtgctttggaagaatacgttaggagccagtaccccaaccagccgacgagattcggaaagcttttgcttcgcctcccttccctccgcaccgtctcctcctcagtcatagagcaattgtttttcgtccgtttggtaggtaaaacccccatcgaaaccctcatccgggatatgttactgtccggcagcagttttaactggccgtatatggcaattcaataaataaataaaataagaagggggagtgaaacagagaaagaaaaggcaaaagactggtttgtttgcttaatttccttctgttaagaaaggatataaaaggatgttacaagtttgctaaaagaagagaggggaagaatttaatggactgtgaatttcaaaaaaaaaaaaaagactgtcaaatgaacttttacagaatgcattaaaaaaaaaaaaactcctgtgtcggtcagaacaacttgctacttatcatttttgtataaaaaggaaattagtctttttctttttttggtaaatttttgaaaaatattgctaaaagtgcatttaaggagattgggagacaattagcagaatggagaaagtaagtcttttttttttccaaattattaattgtcctgtgtctatgtacctctagctgttcttttttgtacttttctggttccaaaccagtttattctgtggttctataataagttttgatataatcttggcttcttaaaaactgtgtatcattaaaatatatgttctgcaagaattaaaactgagtccatgaaaataccataggaagacataaaactttaaaaggcaactcaaagatgatggaaacgcacttacaagtggtgaccaaaatttttaggtgaagtcgagcactctaattagagaactggaggaaccacatataacacttaacttcccctaccctgcccctccccaaaagaaaccatgacaaacctagcttttaaaaaatattttaagaaagagaatgaactgtggaatttattggcagccaaggaatgtgtccaagacacatgctgaggttttgaataaaaagtgaacttttgtaatttgaattgggtcccgcttagttcttgaattgttatgaaaatcctatatctgtttgtatatttgcaaaccctttgtattataattgttgatattttccctttttaaaaaataccattgaaatcagcatgacaaaaataacactgttggcacttataggtaacgtgattgattcagtatcttagagtttacagtttgtgttttaaaaaaactgaaggtttttcttttaagtgcaacatttctgtatactgtaaaagttataataactgaactgtttggtcgagtctttgtgtgttatattccaaggaaaattgaaagtattcagaaattaaaatattatttgatatctgaaaaaaaaaaaaaaaaaaaaaaaaaaaaaaaaaaaa

SEQ ID NO: 88 - protein, 414 aa, Homo sapiens
MAMVVSTWRDPQDEVPGSQGSQASQAPPVPGPPPGAPHTPQTPGQGGPASTPAQTAAGGQGGPGGPGSDKQQQQQHIECVVCGDKSSGKHYGQFTCEGCKSFFKRSVRRNLSYTCRANRNCPIDQHHRNQCQYCRLKKCLKVGMRREAVQRGRMPPTQPTHGQFALTNGDPLNCHSYLSGYISLLLRAEPYPTSRFGSQCMQPNNIMGIENICELAARMLFSAVEWARNIPFFPDLQITDQVALLRLTWSELFVLNAAQCSMPLHVAPLLAAAGLHASPMSADRVVAFMDHIRIFQEQVEKLKALHVDSAEYSCLKAIVLFTSDACGLSDVAHVESLQEKSQCALEEYVRSQYPNQPTRFGKLLLRLPSLRTVSSSVIEQLFFVRLVGKTPIETLIRDMLLSGSSFNWPYMAIQ

SEQ ID NO: 89 - DNA, 2106 bp, Homo Sapiens
  CDS (425)...(1639): EAR2 (NR2F6)
ggcctcccgcgctcggatggcggcccgctgagttggccgcagcccccgggcgagcggcggccaggccagaggacgccccctgcgcggctcgggccgggccatggcccgcgcgcccccgccggggccccagggcggcgggacgcgagtcctctgggcccccggcccgcgcctctagcgtgcccctcccggccccgggcccggccccgcgcacgcgtgggaaagttggcctggaaccggcccgaccagttccgcccgggcgcgaggaccggccgcaggaagttgctgcaaaacttttttggggggtgcagcccgtgccccccgcgcgccggggccgaatgcgcgccgcgtagggtcccccgggccgagaggggtgcccggagggaagagcgcggtgggggcgccccggccccgctgccctggggctatggccatggtgaccggcggctggggcggccccggcggcgacacgaacggcgtggacaaggcgggcggctacccgcgcgcggccgaggacgactcggcctcgccccccggtgccgccagcgacgccgagccgggcgacgaggagcggccggggctgcaggtggactgcgtggtgtgcggggacaagtcgagcggcaagcattacggtgtcttcacctgcgagggctgcaagagctttttcaagcgaagcatccgccgcaacctcagctacacctgccggtccaaccgtgactgccagatcgaccagcaccaccggaaccagtgccagtactgccgtctcaagaagtgcttccgggtgggcatgaggaaggaggcggtgcagcgcggccgcatcccgcactcgctgcctggtgccgtggccgcctcctcgggcagccccccgggctcggcgctggcggcagtggcgagcggcggagacctcttcccggggcagccggtgtccgaactgatcgcgcagctgctgcgcgctgagccctaccctgcggcggccggacgcttcggcgcagggggcggcgcggcgggcgcggtgctgggcatcgacaacgtgtgcgagctggcggcgcggctgctcttcagcaccgtggagtgggcgcgccacgcgcccttcttccccgagctgccggtggccgaccaggtggcgctgctgcgcctgagctggagcgagctcttcgtgctgaacgcggcgcaggcggcgctgcccctgcacacggcgccgctactggccgccgccggcctccacgccgcgcctatggccgccgagcgcgccgtggctttcatggaccaggtgcgcgccttccaggagcaggtggacaagctgggccgcctgcaggtcgactcggccgagtatggctgcctcaaggccatcgcgctcttcacgcccgacgcctgtggcctctcagacccggcccacgttgagagcctgcaggagaaggcgcaggtggccctcaccgagtatgtgcgggcgcagtacccgtcccagccccagcgcttcgggcgcctgctgctgcggctccccgccctgcgcgcggtccctgcctccctcatctcccagctgttcttcatgcgcctggtggggaagacgcccattgagacactgatcagagacatgctgctgtcggggagtaccttcaactggccctacggctcgggccagtgaccatgacggggccacgtgtgctgtggccaggcctgcagacagacctcaagggacagggaatgctgaggcctcgaggggcctcccggggcccaggactctggcttctctcctcagacttctattttttaaagactgtgaaatgtttgtcttttctgttttttaaatgatcatgaaaccaaaaagagactgatcatccaggcctcagcctcatcctccccaggacccctgtccaggatggagggtccaatcctaggacagccttgttcctcagcacccctagcatgaacttgtgggatggtggggttggcttccctggcatgatggacaaaggcctggcgtcggccagaggggctgctccagtgggcaggggtagctagcgtgtgccaggcagatcctctggacacgtaacctatgtcagacactacatgatgactcaaggccaataataaagacatttcctacctgca

SEQ ID NO: 90 - protein, 404 aa, Homo Sapiens
MAMVTGGWGGPGGDTNGVDKAGGYPRAAEDDSASPPGAASDAEPGDEERPGLQVDCVVCGDKSSGKHYGVFTCEGCKSFFKRSIRRNLSYTCRSNRDCQIDQHHRNQCQYCRLKKCFRVGMRKEAVQRGRIPHSLPGAVAASSGSPPGSALAAVASGGDLFPGQPVSELIAQLLRAEPYPAAAGRFGAGGGAAGAVLGIDNVCELAARLLFSTVEWARHAPFFPELPVADQVALLRLSWSELFVLNAAQAALPLHTAPLLAAAGLHAAPMAAERAVAFMDQVRAFQEQVDKLGRLQVDSAEYGCLKAIALFTPDACGLSDPAHVESLQEKAQVALTEYVRAQYPSQPQRFGRLLLRLPALRAVPASLISQLFFMRLVGKTPIETLIRDMLLSGSTFNWPYGSGQ

SEQ ID NO: 91 - DNA, 6450 bp, Homo sapiens
  CDS (361)...(2148): ER alpha (NR3A1)
gagttgtgcctggagtgatgtttaagccaatgtcagggcaaggcaacagtccctggccgtcctccagcacctttgtaatgcatatgagctcgggagaccagtacttaaagttggaggcccgggagcccaggagctggcggagggcgttcgtcctgggagctgcacttgctccgtcgggtcgccggcttcaccggaccgcaggctcccggggcagggccggggccagagctcgcgtgtcggcgggacatgcgctgcgtcgcctctaacctcgggctgtgctctttttccaggtggcccgccggtttctgagccttctgccctgcggggacacggtctgcaccctgcccgcggccacggaccatgaccatgaccctccacaccaaagcatctgggatggccctactgcatcagatccaagggaacgagctggagcccctgaaccgtccgcagctcaagatccccctggagcggcccctgggcgaggtgtacctggacagcagcaagcccgccgtgtacaactaccccgagggcgccgcctacgagttcaacgccgcggccgccgccaacgcgcaggtctacggtcagaccggcctcccctacggccccgggtctgaggctgcggcgttcggctccaacggcctggggggtttccccccactcaacagcgtgtctccgagcccgctgatgctactgcacccgccgccgcagctgtcgcctttcctgcagccccacggccagcaggtgccctactacctggagaacgagcccagcggctacacggtgcgcgaggccggcccgccggcattctacaggccaaattcagataatcgacgccagggtggcagagaaagattggccagtaccaatgacaagggaagtatggctatggaatctgccaaggagactcgctactgtgcagtgtgcaatgactatgcttcaggctaccattatggagtctggtcctgtgagggctgcaaggccttcttcaagagaagtattcaaggacataacgactatatgtgtccagccaccaaccagtgcaccattgataaaaacaggaggaagagctgccaggcctgccggctccgcaaatgctacgaagtgggaatgatgaaaggtgggatacgaaaagaccgaagaggagggagaatgttgaaacacaagcgccagagagatgatggggagggcaggggtgaagtggggtctgctggagacatgagagctgccaacctttggccaagcccgctcatgatcaaacgctctaagaagaacagcctggccttgtccctgacggccgaccagatggtcagtgccttgttggatgctgagccccccatactctattccgagtatgatcctaccagacccttcagtgaagcttcgatgatgggcttactgaccaacctggcagacagggagctggttcacatgatcaactgggcgaagagggtgccaggctttgtggatttgaccctccatgatcaggtccaccttctagaatgtgcctggctagagatcctgatgattggtctcgtctggcgctccatggagcacccagtgaagctactgtttgctcctaacttgctcttggacaggaaccagggaaaatgtgtagagggcatggtggagatcttcgacatgctgctggctacatcatctcggttccgcatgatgaatctgcagggagaggagtttgtgtgcctcaaatctattattttgcttaattctggagtgtacacatttctgtccagcaccctgaagtctctggaagagaaggaccatatccaccgagtcctggacaagatcacagacactttgatccacctgatggccaaggcaggcctgaccctgcagcagcagcaccagcggctggcccagctcctcctcatcctctcccacatcaggcacatgagtaacaaaggcatggagcatctgtacagcatgaagtgcaagaacgtggtgcccctctatgacctgctgctggagatgctggacgcccaccgcctacatgcgcccactagccgtggaggggcatccgtggaggagacggaccaaagccacttggccactgcgggctctacttcatcgcattccttgcaaaagtattacatcacgggggaggcagagggtttccctgccacagtctgagagctccctggctcccacacggttcagataatccctgctgcattttaccctcatcatgcaccactttagccaaattctgtctcctgcatacactccggcatgcatccaacaccaatggctttctagatgagtggccattcatttgcttgctcagttcttagtggcacatcttctgtcttctgttgggaacagccaaagggattccaaggctaaatctttgtaacagctctctttcccccttgctatgttactaagcgtgaggattcccgtagctcttcacagctgaactcagtctatgggttggggctcagataactctgtgcatttaagctacttgtagagacccaggcctggagagtagacattttgcctctgataagcactttttaaatggctctaagaataagccacagcaaagaatttaaagtggctcctttaattggtgacttggagaaagctaggtcaagggtttattatagcaccctcttgtattcctatggcaatgcatccttttatgaaagtggtacaccttaaagcttttatatgactgtagcagagtatctggtgattgtcaattcacttccccctataggaatacaaggggccacacagggaaggcagatcccctagttggccaagacttattttaacttgatacactgcagattcagagtgtcctgaagctctgcctctggctttccggtcatgggttccagttaattcatgcctcccatggacctatggagagcaacaagttgatcttagttaagtctccctatatgagggataagttcctgatttttgtttttatttttgtgttacaaaagaaagccctccctccctgaacttgcagtaaggtcagcttcaggacctgttccagtgggcactgtacttggatcttcccggcgtgtgtgtgccttacacaggggtgaactgttcactgtggtgatgcatgatgagggtaaatggtagttgaaaggagcaggggccctggtgttgcatttagccctggggcatggagctgaacagtacttgtgcaggattgttgtggctactagagaacaagagggaaagtagggcagaaactggatacagttctgagcacagccagacttgctcaggtggccctgcacaggctgcagctacctaggaacattccttgcagaccccgcattgcctttgggggtgccctgggatccctggggtagtccagctcttattcatttcccagcgtggccctggttggaagaagcagctgtcaagttgtagacagctgtgttcctacaattggcccagcaccctggggcacgggagaagggtggggaccgttgctgtcactactcaggctgactggggcctggtcagattacgtatgcccttggtggtttagagataatccaaaatcagggtttggtttggggaagaaaatcctcccccttcctcccccgccccgttccctaccgcctccactcctgccagctcatttccttcaatttcctttgacctataggctaaaaaagaaaggctcattccagccacagggcagccttccctgggcctttgcttctctagcacaattatgggttacttcctttttcttaacaaaaaagaatgtttgatttcctctgggtgaccttattgtctgtaattgaaaccctattgagaggtgatgtctgtgttagccaatgacccaggtagctgctcgggcttctcttggtatgtcttgtttggaaaagtggatttcattcatttctgattgtccagttaagtgatcaccaaaggactgagaatctgggagggcaaaaaaaaaaaaaaaagtttttatgtgcacttaaatttggggacaattttatgtatctgtgttaaggatatgcttaagaacataattcttttgttgctgtttgtttaagaagcaccttagtttgtttaagaagcaccttatatagtataatatatatttttttgaaattacattgcttgtttatcagacaattgaatgtagtaattctgttctggatttaatttgactgggttaacatgcaaaaaccaaggaaaaatatttagtttttttttttttttttgtatacttttcaagctaccttgtcatgtatacagtcatttatgcctaaagcctggtgattattcatttaaatgaagatcacatttcatatcaacttttgtatccacagtagacaaaatagcactaatccagatgcctattgttggatattgaatgacagacaatcttatgtagcaaagattatgcctgaaaaggaaaattattcagggcagctaattttgcttttaccaaaatatcagtagtaatatttttggacagtagctaatgggtcagtgggttctttttaatgtttatacttagattttcttttaaaaaaattaaaataaaacaaaaaaaatttctaggactagacgatgtaataccagctaaagccaaacaattatacagtggaaggttttacattattcatccaatgtgtttctattcatgttaagatactactacatttgaagtgggcagagaacatcagatgattgaaatgttcgcccaggggtctccagcaactttggaaatctctttgtatttttacttgaagtgccactaatggacagcagatattttctggctgatgttggtattgggtgtaggaacatgatttaaaaaaaaaactcttgcctctgctttcccccactctgaggcaagttaaaatgtaaaagatgtgatttatctggggggctcaggtatggtggggaagtggattcaggaatctggggaatggcaaatatattaagaagagtattgaaagtatttggaggaaaatggttaattctgggtgtgcaccaaggttcagtagagtccacttctgccctggagaccacaaatcaactagctccatttacagccatttctaaaatggcagcttcagttctagagaagaaagaacaacatcagcagtaaagtccatggaatagctagtggtctgtgtttcttttcgccattgcctagcttgccgtaatgattctataatgccatcatgcagcaattatgagaggctaggtcatccaaagagaagaccctatcaatgtaggttgcaaaatctaacccctaaggaagtgcagtctttgatttgatttccctagtaaccttgcagatatgtttaaccaagccatagcccatgccttttgagggctgaacaaataagggacttactgataatttacttttgatcacattaaggtgttctcaccttgaaatcttatacactgaaatggccattgatttaggccactggcttagagtactccttcccctgcatgacactgattacaaatactttcctattcatactttccaattatgagatggactgtgggtactgggagtgatcactaacaccatagtaatgtctaatattcacaggcagatctgcttggggaagctagttatgtgaaaggcaaataaagtcatacagtagctcaaaaggcaaccataattctctttggtgcaagtcttgggagcgtgatctagattacactgcaccattcccaagttaatcccctgaaaacttactctcaactggagcaaatgaactttggtcccaaatatccatcttttcagtagcgttaattatgctctgtttccaactgcatttcctttccaattgaattaaagtgtggcctcgtttttagtcatttaaaattgttttctaagtaattgctgcctctattatggcacttcaattttgcactgtcttttgagattcaagaaaaatttctattcatttttttgcatccaattgtgcctgaacttttaaaatatgtaaatgctgccatgttccaaacccatcgtcagtgtgtgtgtttagagctgtgcaccctagaaacaacatacttgtcccatgagcaggtgcctgagacacagacccctttgcattcacagagaggtcattggttatagagacttgaattaataagtgacattatgccagtttctgttctctcacaggtgataaacaatgctttttgtgcactacatactcttcagtgtagagctcttgttttatgggaaaaggctcaaatgccaaattgtgtttgatggattaatatgcccttttgccgatgcatactattactgatgtgactcggttttgtcgcagctttgctttgtttaatgaaacacacttgtaaacctcttttgcactttgaaaaagaatccagcgggatgctcgagcacctgtaaacaattttctcaacctatttgatgttcaaataaagaattaaact

SEQ ID NO: 92 - protein, 595 aa, Homo sapiens
MTMTLHTKASGMALLHQIQGNELEPLNRPQLKIPLERPLGEVYLDSSKPAVYNYPEGAAYEFNAAAAANAQVYGQTGLPYGPGSEAAAFGSNGLGGFPPLNSVSPSPLMLLHPPPQLSPFLQPHGQQVPYYLENEPSGYTVREAGPPAFYRPNSDNRRQGGRERLASTNDKGSMAMESAKETRYCAVCNDYASGYHYGVWSCEGCKAFFKRSIQGHNDYMCPATNQCTIDKNRRKSCQACRLRKCYEVGMMKGGIRKDRRGGRMLKHKRQRDDGEGRGEVGSAGDMRAANLWPSPLMIKRSKKNSLALSLTADQMVSALLDAEPPILYSEYDPTRPFSEASMMGLLTNLADRELVHMINWAKRVPGFVDLTLHDQVHLLECAWLEILMIGLVWRSMEHPVKLLFAPNLLLDRNQGKCVEGMVEIFDMLLATSSRFRMMNLQGEEFVCLKSIILLNSGVYTFLSSTLKSLEEKDHIHRVLDKITDTLIHLMAKAGLTLQQQHQRLAQLLLILSHIRHMSNKGMEHLYSMKCKNVVPLYDLLLEMLDAHRLHAPTSRGGASVEETDQSHLATAGSTSSHSLQKYYITGEAEGFPATV

SEQ ID NO: 93 - DNA, 2011 bp, Homo sapiens
  CDS (419)...(2011): ER beta (NR3A2)
tttcagtttctccagctgctggctttttggacacccactcccccgccaggaggcagttgcaagcgcggaggctgcgagaaataactgcctcttgaaacttgcagggcgaagagcaggcggcgagcgctgggccggggagggaccacccgagctgcgacgggctctggggctgcggggcagggctggcgcccggagcctgagctgcaggaggtgcgctcgctttcctcaacaggtggcggcggggcgcgcgccgggagaccccccctaatgcgggaaaagcacgtgtccgcattttagagaaggcaaggccggtgtgtttatctgcaagccattatacttgcccacgaatctttgagaacattataatgacctttgtgcctcttcttgcaaggtgttttctcagctgttatctcaagacatggatataaaaaactcaccatctagccttaattctccttcctcctacaactgcagtcaatccatcttacccctggagcacggctccatatacataccttcctcctatgtagacagccaccatgaatatccagccatgacattctatagccctgctgtgatgaattacagcattcccagcaatgtcactaacttggaaggtgggcctggtcggcagaccacaagcccaaatgtgttgtggccaacacctgggcacctttctcctttagtggtccatcgccagttatcacatctgtatgcggaacctcaaaagagtccctggtgtgaagcaagatcgctagaacacaccttacctgtaaacagagagacactgaaaaggaaggttagtgggaaccgttgcgccagccctgttactggtccaggttcaaagagggatgctcacttctgcgctgtctgcagcgattacgcatcgggatatcactatggagtctggtcgtgtgaaggatgtaaggccttttttaaaagaagcattcaaggacataatgattatatttgtccagctacaaatcagtgtacaatcgataaaaaccggcgcaagagctgccaggcctgccgacttcggaagtgttacgaagtgggaatggtgaagtgtggctcccggagagagagatgtgggtaccgccttgtgcggagacagagaagtgccgacgagcagctgcactgtgccggcaaggccaagagaagtggcggccacgcgccccgagtgcgggagctgctgctggacgccctgagccccgagcagctagtgctcaccctcctggaggctgagccgccccatgtgctgatcagccgccccagtgcgcccttcaccgaggcctccatgatgatgtccctgaccaagttggccgacaaggagttggtacacatgatcagctgggccaagaagattcccggctttgtggagctcagcctgttcgaccaagtgcggctcttggagagctgttggatggaggtgttaatgatggggctgatgtggcgctcaattgaccaccccggcaagctcatctttgctccagatcttgttctggacagggatgaggggaaatgcgtagaaggaattctggaaatctttgacatgctcctggcaactacttcaaggtttcgagagttaaaactccaacacaaagaatatctctgtgtcaaggccatgatcctgctcaattccagtatgtaccctctggtcacagcgacccaggatgctgacagcagccggaagctggctcacttgctgaacgccgtgaccgatgctttggtttgggtgattgccaagagcggcatctcctcccagcagcaatccatgcgcctggctaacctcctgatgctcctgtcccacgtcaggcatgcgagtaacaagggcatggaacatctgctcaacatgaagtgcaaaaatgtggtcccagtgtatgacctgctgctggagatgctgaatgcccacgtgcttcgcgggtgcaagtcctccatcacggggtccgagtgcagcccggcagaggacagtaaaagcaaagagggctcccagaacccacagtctcagtga

SEQ ID NO: 94 - protein, 530 aa, Homo sapiens
MDIKNSPSSLNSPSSYNCSQSILPLEHGSIYIPSSYVDSHHEYPAMTFYSPAVMNYSIPSNVTNLEGGPGRQTTSPNVLWPTPGHLSPLVVHRQLSHLYAEPQKSPWCEARSLEHTLPVNRETLKRKVSGNRCASPVTGPGSKRDAHFCAVCSDYASGYHYGVWSCEGCKAFFKRSIQGHNDYICPATNQCTIDKNRRKSCQACRLRKCYEVGMVKCGSRRERCGYRLVRRQRSADEQLHCAGKAKRSGGHAPRVRELLLDALSPEQLVLTLLEAEPPHVLISRPSAPFTEASMMMSLTKLADKELVHMISWAKKIPGFVELSLFDQVRLLESCWMEVLMMGLMWRSIDHPGKLIFAPDLVLDRDEGKCVEGILEIFDMLLATTSRFRELKLQHKEYLCVKAMILLNSSMYPLVTATQDADSSRKLAHLLNAVTDALVWVIAKSGISSQQQSMRLANLLMLLSHVRHASNKGMEHLLNMKCKNVVPVYDLLLEMLNAHVLRGCKSSITGSECSPAEDSKSKEGSQNPQSQ

SEQ ID NO: 95 - DNA, 2221 bp, Homo Sapiens
  CDS (178)...(1449): ERR alpha (NR3B1)
tcctacaagcagccggcggcgccgccgagtgaggggacgcggcgcggtggggcggcgcggcccgaggaggcggcggaggaggggccgcccgcggcccccggctcactccggcactccgggccgctcggcccccatgcctgcccgaccgcgctgccggagccccaggtgaccagcgccatgtccagccaggtggtgggcattgagcctctctacatcaaggcagagccggccagccctgacagtccaaagggttcctcggagacagagaccgagcctcctgtggccctggcccctggtccagctcccactcgctgcctcccaggccacaaggaagaggaggatggggagggggctgggcctggcgagcagggcggtgggaagctggtgctcagctccctgcccaagcgcctctgcctggtctgtggggacgtggcctccggctaccactatggtgtggcatcctgtgaggcctgcaaagccttcttcaagaggaccatccaggggagcatcgagtacagctgtccggcctccaacgagtgtgagatcaccaagcggagacgcaaggcctgccaggcctgccgcttcaccaagtgcctgcgggtgggcatgctcaaggagggagtgcgcctggaccgcgtccggggtgggcggcagaagtacaagcggcggccggaggtggacccactgcccttcccgggccccttccctgctgggcccctggcagtcgctggaggcccccggaagacagcagccccagtgaatgcactggtgtctcatctgctggtggttgagcctgagaagctctatgccatgcctgaccccgcaggccctgatgggcacctcccagccgtggctaccctctgtgacctctttgaccgagagattgtggtcaccatcagctgggccaagagcatcccaggcttctcatcgctgtcgctgtctgaccagatgtcagtactgcagagcgtgtggatggaggtgctggtgctgggtgtggcccagcgctcactgccactgcaggatgagctggccttcgctgaggacttagtcctggatgaagagggggcacgggcagctggcctgggggaactgggggctgccctgctgcaactagtgcggcggctgcaggccctgcggctggagcgagaggagtatgttctactaaaggccttggcccttgccaattcagactctgtgcacatcgaagatgccgaggctgtggagcagctgcgagaagctctgcacgaggccctgctggagtatgaagccggccgggctggccccggagggggtgctgagcggcggcgggcgggcaggctgctgctcacgctaccgctcctccgccagacagcgggcaaagtgctggcccatttctatggggtgaagctggagggcaaggtgcccatgcacaagctgttcttggagatgctcgaggccatgatggactgaggcaaggggtgggactggtgggggttctggcaggacctgcctagcatggggtcagccccaagggctggggcggagctggggtctgggcagtgccacagcctgctggcagggccagggcaatgccatcagcccctgggaacaggccccacgccctctcctccccctcctagggggtgtcagaagctgggaacgtgtgtccaggctctgggcacagtgctgccccttgcaagccataacgtgcccccagagtgtagggggccttgcggaagccatagggggctgcacgggatgcgtgggaggcagaaacctatctcagggagggaaggggatggaggccagagtctcccagtgggtgatgcttttgctgctgcttaatcctaccccctcttcaaagcagagtgggacttggagagcaaaggcccatgcccccttcgctcctcctctcatcatttgcattgggcattagtgtccccccttgaagcaataactccaagcagactccagcccctggacccctggggtggccagggcttccccatcagctcccaacgagcctcctcagggggtaggagagcactgcctctatgccctgcagagcaataacactatatttatttttgggtttggccagggaggcgcagggacatggggcaagccagggcccagagcccttggctgtacagagactctattttaatgtatatttgctgcaaagagaaaccgcttttggttttaaacctttaatgagaaaaaaatatataataccgagctc

SEQ ID NO: 96 - protein, 423 aa, Homo Sapiens
MSSQVVGIEPLYIKAEPASPDSPKGSSETETEPPVALAPGPAPTRCLPGHKEEEDGEGAGPGEQGGGKLVLSSLPKRLCLVCGDVASGYHYGVASCEACKAFFKRTIQGSIEYSCPASNECEITKRRRKACQACRFTKCLRVGMLKEGVRLDRVRGGRQKYKRRPEVDPLPFPGPFPAGPLAVAGGPRKTAAPVNALVSHLLVVEPEKLYAMPDPAGPDGHLPAVATLCDLFDREIVVTISWAKSIPGFSSLSLSDQMSVLQSVWMEVLVLGVAQRSLPLQDELAFAEDLVLDEEGARAAGLGELGAALLQLVRRLQALRLEREEYVLLKALALANSDSVHIEDAEAVEQLREALHEALLEYEAGRAGPGGGAERRRAGRLLLTLPLLRQTAGKVLAHFYGVKLEGKVPMHKLFLEMLEAMMD

SEQ ID NO: 97 - DNA, 2193 bp, Homo sapiens
  CDS (336)...(1838): ERR beta (NR3B2)
cgggagcccatggagcactgtcctcagagatgcgcaggttaggctcactgtctaggccaggcccaccttagtcactgtggactggcaatggaagctcttcctggacacacctgccctagccctcaccctggggtggaagagaaatgagcttggcttgcaactcagaccattccacggaggcatcctcccttccctgggctggtgaataaaagtttcctgaggtcaaggacttccttttccctgccaaaatggtgtccagaactttgaggccagaggtgatccagtgatttgggagctgcaggtcacacaggctgctcagagggctgctgaacaggatgtcctcggacgacaggcacctgggctccagctgcggctccttcatcaagactgagccgtccagcccgtcctcgggcattgatgccctcagccaccacagccccagtggctcgtccgacgccagcggcggctttggcctggccctgggcacccacgccaacggtctggactcgccacccatgtttgcaggcgccgggctgggaggcaccccatgccgcaagagctacgaggactgtgccagcggcatcatggaggactcggccatcaagtgcgagtacatgctcaacgccatccccaagcgcctgtgcctcgtgtgcggggacattgcctctggctaccactacggcgtggcctcctgcgaggcttgcaaggccttcttcaagaggactatccaagggaacattgagtacagctgcccggccaccaacgagtgcgagatcaccaaacggaggcgcaagtcctgccaggcctgccgcttcatgaaatgcctcaaagtggggatgctgaaggaaggtgtgcgccttgatcgagtgcgtggaggccgtcagaaatacaagcgacggctggactcagagagcagcccatacctgagcttacaaatttctccacctgctaaaaagccattgaccaagattgtctcatacctactggtggctgagccggacaagctctatgccatgcctccccctggtatgcctgagggggacatcaaggccctgaccactctctgtgacctggcagaccgagagcttgtggtcatcattggctgggccaagcacatcccaggcttctcaagcctctccctgggggaccagatgagcctgctgcagagtgcctggatggaaatcctcatcctgggcatcgtgtaccgctcgctgccctatgacgacaagctggtgtacgctgaggactacatcatggatgaggagcactcccgcctcgcggggctgctggagctctaccgggccatcctgcagctggtacgcaggtacaagaagctcaaggtggagaaggaggagtttgtgacgctcaaggccctggccctcgccaactccgattccatgtacatcgaggatctagaggctgtccagaagctgcaggacctgctgcacgaggcactgcaggactacgagctgagccagcgccatgaggagccctggaggacgggcaagctgctgctgacactgccgctgctgcggcagacggccgccaaggccgtgcagcacttctatagcgtcaaactgcagggcaaagtgcccatgcacaaactcttcctggagatgctggaggccaaggcctgggccagggctgactcccttcaggagtggaggccactggagcaagtgccctctcccctccaccgagccaccaagaggcagcatgtgcatttcctaactcccttgccccctcccccatctgtggcctgggtgggcactgctcaggctggataccacctggaggttttccttccgcagagggcaggttggccaagagcagcttagaggatctcccaaggatgaaagaatgtcaagccatgatggaaaatgccccttccaatcagctgccttcacaagcagggatcagagcaactccccggggatccccaatccacgcccttctagtccaacccccctcaatgagagaggcaggcagatctcacccagcactaggacaccaggaggccagggaaagcatctctggctcaccatgtaacatctggcttggagcaagtgggtgttctgcacaccaggcagctgcacctcactggatctagtgttgctgcgagtgacctcacttcagagcccctctagcagagtggggcggaagtcctgatggttggtgtccatgaggtggaag

SEQ ID NO: 98 - protein, 500 aa, Homo sapiens
MSSDDRHLGSSCGSFIKTEPSSPSSGIDALSHHSPSGSSDASGGFGLALGTHANGLDSPPMFAGAGLGGTPCRKSYEDCASGIMEDSAIKCEYMLNAIPKRLCLVCGDIASGYHYGVASCEACKAFFKRTIQGNIEYSCPATNECEITKRRRKSCQACRFMKCLKVGMLKEGVRLDRVRGGRQKYKRRLDSESSPYLSLQISPPAKKPLTKIVSYLLVAEPDKLYAMPPPGMPEGDIKALTTLCDLADRELVVIIGWAKHIPGFSSLSLGDQMSLLQSAWMEILILGIVYRSLPYDDKLVYAEDYIMDEEHSRLAGLLELYRAILQLVRRYKKLKVEKEEFVTLKALALANSDSMYIEDLEAVQKLQDLLHEALQDYELSQRHEEPWRTGKLLLTLPLLRQTAAKAVQHFYSVKLQGKVPMHKLFLEMLEAKAWARADSLQEWRPLEQVPSPLHRATKRQHVHFLTPLPPPPSVAWVGTAQAGYHLEVFLPQRAGWPRAA

SEQ ID NO: 99 - DNA, 5253 bp, Homo sapiens
  CDS (167)...(1543): ERR gamma (NR3B3)
aatcggggctttaagtccttgattaggagagtgtgagagctttggtcccaactggctgtgcctataggcttgtcactaggagaacatttgtgttaattgcactgtgctctgtcaaggaaactttgatttatagctggggtgcacaaataatggttgccggtcgcacatggattcggtagaactttgccttcctgaatctttttccctgcactacgaggaagagcttctctgcagaatgtcaaacaaagatcgacacattgattccagctgttcgtccttcatcaagacggaaccttccagcccagcctccctgacggacagcgtcaaccaccacagccctggtggctcttcagacgccagtgggagctacagttcaaccatgaatggccatcagaacggacttgactcgccacctctctacccttctgctcctatcctgggaggtagtgggcctgtcaggaaactgtatgatgactgctccagcaccattgttgaagatccccagaccaagtgtgaatacatgctcaactcgatgcccaagagactgtgtttagtgtgtggtgacatcgcttctgggtaccactatggggtagcatcatgtgaagcctgcaaggcattcttcaagaggacaattcaaggcaatatagaatacagctgccctgccacgaatgaatgtgaaatcacaaagcgcagacgtaaatcctgccaggcttgccgcttcatgaagtgtttaaaagtgggcatgctgaaagaaggggtgcgtcttgacagagtacgtggaggtcggcagaagtacaagcgcaggatagatgcggagaacagcccatacctgaaccctcagctggttcagccagccaaaaagccatataacaagattgtctcacatttgttggtggctgaaccggagaagatctatgccatgcctgaccctactgtccccgacagtgacatcaaagccctcactacactgtgtgacttggccgaccgagagttggtggttatcattggatgggcgaagcatattccaggcttctccacgctgtccctggcggaccagatgagccttctgcagagtgcttggatggaaattttgatccttggtgtcgtataccggtctctttcgtttgaggatgaacttgtctatgcagacgattatataatggacgaagaccagtccaaattagcaggccttcttgatctaaataatgctatcctgcagctggtaaagaaatacaagagcatgaagctggaaaaagaagaatttgtcaccctcaaagctatagctcttgctaattcagactccatgcacatagaagatgttgaagccgttcagaagcttcaggatgtcttacatgaagcgctgcaggattatgaagctggccagcacatggaagaccctcgtcgagctggcaagatgctgatgacactgccactcctgaggcagacctctaccaaggccgtgcagcatttctacaacatcaaactagaaggcaaagtcccaatgcacaaactttttttggaaatgttggaggccaaggtctgactaaaagctccctgggccttcccatccttcatgttgaaaaagggaaaataaacccaagagtgatgtcgaagaaacttagagtttagttaacaacatcaaaaatcaacagactgcactgataatttagcagcaagactatgaagcagctttcagattcctccataggttcctgatgagtttctttctactttctccatcatcttctttcctctttcttcccacatttctctttctctttattttttctccttttcttctttcacctcccttatttctttgcttctttcattcctagttcccattctcctttattttcttcccgtctgcctgccttctttcttttctttacctactctcattcctctcttttctcatccttccccttttttctaaatttgaaatagctttagtttaaaaaaaaatcctcccttccccctttcctttccctttctttcctttttccctttccttttccctttcctttcctttcctcttgaccttctttccatctttctttttcttccttctgctgctgaacttttaaaagaggtctctaactgaagagagatggaagccagccctgccaaaggatggagatccataatatggatgccagtgaacttattgtgaaccatactgtccccaatgactaaggaatcaaagagagagaaccaacgttcctaaaagtacagtgcaacatatacaaattgactgagtgcagtattagatttcatgggagcagcctctaattagacaacttaagcaacgttgcatcggctgcttcttatcattgcttttccatctagatcagttacagccatttgattccttaattgttttttcaagtcttccaggtatttgttagtttagctactatgtaactttttcagggaatagtttaagctttattcattcatgcaatactaaagagaaataagaatactgcaattttgtgctggctttgaacaattacgaacaataatgaaggacaaatgaatcctgaaggaagatttttaaaaatgttttgtttcttcttacaaatggagatttttttgtaccagctttaccacttttcagccatttattaatatgggaatttaacttactcaagcaatagttgaagggaaggtgcatattatcacggatgcaatttatgttgtgtgccagtctggtcccaaacatcaatttcttaacatgagctccagtttacctaaatgttcactgacacaaaggatgagattacacctacagtgactctgagtagtcacatatataagcactgcacatgagatatagatccgtagaattgtcaggagtgcacctctctacttgggaggtacaattgccatatgatttctagctgccatggtggttaggaatgtgatactgcctgtttgcaaagtcacagaccttgcctcagaaggagctgtgagccagtattcatttaagaggcaataaggcaaatgccagaattaaaaaaaaaaatcatcaaagacagaaaatgcctgaccaaattctaaaacctaatccatataagtttattcatttaggaatgttcgtttaaattaatctgcagtttttaccaagagctaagccaatatatgtgcttttcaaccagtattgtcacagcatgaaagtcaagtcaggttccagactgttaagaggtgtaatctaatgaagaaatcaattagatgccccgaaatctacagtcgctgaataaccaataaacagtaacctccatcaaatgctataccaatggaccagtgttagtagctgctccctgtattatgtgaacagtcttattctatgtacacagatgtaattaaaattgtaatcctaacaaacaaaagaaatgtagttcagcttttcaatgtttcatgtttgctgtgcttttctgaattttatgttgcattcaaagactgttgtcttgttcttgtggtgtttggattcttgtggtgtgtgcttttagacacagggtagaattagagacaatattggatgtacaattcctcaggagactacagtagtatattctattccttaccagtaataaggttcttcctaataataattaagagattgaaactccaaacaagtattcattatgaacagatacacatcaaaatcataataatattttcaaaacaaggaataatttctctaatggtttattatagaataccaatgtatagcttagaaataaaactttgaatatttcaagaatatagataagtctaatttttaaatgctgtatatatggctttcactcaatcatctctcagatgttgttattaactcgctctgtgttgttgcaaaactttttggtgcagattcgtttccaaaactattgctactttgtgtgctttaaacaaaataccttgggttgatgaaacatcaacccagtgctaggaatactgtgtatctatcattagctatatgggactatattgtagattgtggtttctcagtagagaagtgactgtagtgtgattctagataaatcatcattagcaattcattcagatggtcaataacttgaaatttatagctgtgataggagttcagaaattggcacatccctttaaaaataacaacagaaaatacaactcctgggaaaaaaggtgctgattctataagattatttatatatgtaagtgtttaaaaagattattttccagaaagtttgtgcagggtttaagttgctactattcaactacactatatataaataaaatatatacaatatatacattgttttcactgtatcacattaaagtacttgggcttcagaagtaagagccaaccaactgaaaacctgagatggagatatgttcaaagaatgagatacaattttttagttttcagtttaagtaactctcagcattacaaaagagtaagtatctcacaaataggaaataaaactaaaacgtggatttaaaaagaactgcacgggctttagggtaaatgctcatcttaaacctcactagagggaagtcttctcaagtttcaagcaagaccatttacttaatgtgaagttttggaaagttataaaggtgtatgttttagccatatgattttaattttaattttgcttcttttaggttcgttcttatttaaagcaatatgattgtgtgactccttgtagttacacttgtgtttcaatcagatcagattgttgtatttattccactattttgcatttaaatgataacataaaagatataaaaaatttaaaactgctatttttcttatagaagagaaaatgggtgttggtgattgtattttaattatttaagcgtctctgtttacctgcctaggaaaacattttatggcagtcttatgtgcaaagatcgtaaaaggacaaaaaatttaaactgcttataataatccaggagttgcattatagccagtagtaaaaataataataataataataaaaccatgtctatagctgtagatgggcttcacatctgtaaagcaatcaattgtatatttttgtgatgtgtaccatactgtgtgctccagcaaatgtccatttgtgtaaatgtatttattttatattgtatatattgttaaatgcaaaaaggagatatgattctgtaactccaatcagttcagatgtgtaactcaaattattatgcctttcaggatgatggtagagcaatattaaacaagcttccacttttgactgctaaaaaaaaaaaaaaaaa

SEQ ID NO: 100 - protein, 458 aa, Homo sapiens
MDSVELCLPESFSLHYEEELLCRMSNKDRHIDSSCSSFIKTEPSSPASLTDSVNHHSPGGSSDASGSYSSTMNGHQNGLDSPPLYPSAPILGGSGPVRKLYDDCSSTIVEDPQTKCEYMLNSMPKRLCLVCGDIASGYHYGVASCEACKAFFKRTIQGNIEYSCPATNECEITKRRRKSCQACRFMKCLKVGMLKEGVRLDRVRGGRQKYKRRIDAENSPYLNPQLVQPAKKPYNKIVSHLLVAEPEKIYAMPDPTVPDSDIKALTTLCDLADRELVVIIGWAKHIPGFSTLSLADQMSLLQSAWMEILILGVVYRSLSFEDELVYADDYIMDEDQSKLAGLLDLNNAILQLVKKYKSMKLEKEEFVTLKAIALANSDSMHIEDVEAVQKLQDVLHEALQDYEAGQHMEDPRRAGKMLMTLPLLRQTSTKAVQHFYNIKLEGKVPMHKLFLEMLEAKV

SEQ ID NO: 101 - DNA, 4788 bp, Homo sapiens
  CDS (133)...(2466): GR alpha (NR3C1)
tttttagaaaaaaaaaatatatttccctcctgctccttctgcgttcacaagctaagttgtttatctcggctgcggcgggaactgcggacggtggcgggcgagcggctcctctgccagagttgatattcactgatggactccaaagaatcattaactcctggtagagaagaaaaccccagcagtgtgcttgctcaggagaggggagatgtgatggacttctataaaaccctaagaggaggagctactgtgaaggtttctgcgtcttcaccctcactggctgtcgcttctcaatcagactccaagcagcgaagacttttggttgattttccaaaaggctcagtaagcaatgcgcagcagccagatctgtccaaagcagtttcactctcaatgggactgtatatgggagagacagaaacaaaagtgatgggaaatgacctgggattcccacagcagggccaaatcagcctttcctcgggggaaacagacttaaagcttttggaagaaagcattgcaaacctcaataggtcgaccagtgttccagagaaccccaagagttcagcatccactgctgtgtctgctgcccccacagagaaggagtttccaaaaactcactctgatgtatcttcagaacagcaacatttgaagggccagactggcaccaacggtggcaatgtgaaattgtataccacagaccaaagcacctttgacattttgcaggatttggagttttcttctgggtccccaggtaaagagacgaatgagagtccttggagatcagacctgttgatagatgaaaactgtttgctttctcctctggcgggagaagacgattcattccttttggaaggaaactcgaatgaggactgcaagcctctcattttaccggacactaaacccaaaattaaggataatggagatctggttttgtcaagccccagtaatgtaacactgccccaagtgaaaacagaaaaagaagatttcatcgaactctgcacccctggggtaattaagcaagagaaactgggcacagtttactgtcaggcaagctttcctggagcaaatataattggtaataaaatgtctgccatttctgttcatggtgtgagtacctctggaggacagatgtaccactatgacatgaatacagcatccctttctcaacagcaggatcagaagcctatttttaatgtcattccaccaattcccgttggttccgaaaattggaataggtgccaaggatctggagatgacaacttgacttctctggggactctgaacttccctggtcgaacagttttttctaatggctattcaagccccagcatgagaccagatgtaagctctcctccatccagctcctcaacagcaacaacaggaccacctcccaaactctgcctggtgtgctctgatgaagcttcaggatgtcattatggagtcttaacttgtggaagctgtaaagttttcttcaaaagagcagtggaaggacagcacaattacctatgtgctggaaggaatgattgcatcatcgataaaattcgaagaaaaaactgcccagcatgccgctatcgaaaatgtcttcaggctggaatgaacctggaagctcgaaaaacaaagaaaaaaataaaaggaattcagcaggccactacaggagtctcacaagaaacctctgaaaatcctggtaacaaaacaatagttcctgcaacgttaccacaactcacccctaccctggtgtcactgttggaggttattgaacctgaagtgttatatgcaggatatgatagctctgttccagactcaacttggaggatcatgactacgctcaacatgttaggagggcggcaagtgattgcagcagtgaaatgggcaaaggcaataccaggtttcaggaacttacacctggatgaccaaatgaccctactgcagtactcctggatgtttcttatggcatttgctctggggtggagatcatatagacaatcaagtgcaaacctgctgtgttttgctcctgatctgattattaatgagcagagaatgactctaccctgcatgtacgaccaatgtaaacacatgctgtatgtttcctctgagttacacaggcttcaggtatcttatgaagagtatctctgtatgaaaaccttactgcttctctcttcagttcctaaggacggtctgaagagccaagagctatttgatgaaattagaatgacctacatcaaagagctaggaaaagccattgtcaagagggaaggaaactccagccagaactggcagcggttttatcaactgacaaaactcttggattctatgcatgaagtggttgaaaatctccttaactattgcttccaaacatttttggataagaccatgagtattgaattccccgagatgttagctgaaatcatcaccaatcagataccaaaatattcaaatggaaatatcaaaaaacttctgtttcatcaaaagtgactgccttaataagaatggttgccttaaagaaagtcgaattaatagcttttattgtataaactatcagtttgtcctgtagaggttttgttgttttattttttattgttttcatctgttgttttgttttaaatacgcactacatgtggtttatagagggccaagacttggcaacagaagcagttgagtcgtcatcacttttcagtgatgggagagtagatggtgaaatttattagttaatatatcccagaaattagaaaccttaatatgtggacgtaatctccacagtcaaagaaggatggcacctaaaccaccagtgcccaaagtctgtgtgatgaactttctcttcatactttttttcacagttggctggatgaaattttctagactttctgttggtgtatcccccccctgtatagttaggatagcatttttgatttatgcatggaaacctgaaaaaaagtttacaagtgtatatcagaaaagggaagttgtgccttttatagctattactgtctggttttaacaatttcctttatatttagtgaactacgcttgctcattttttcttacataattttttattcaagttattgtacagctgtttaagatgggcagctagttcgtagctttcccaaataaactctaaacattaatcaatcatctgtgtgaaaatgggttggtgcttctaacctgatggcacttagctatcagaagaccacaaaaattgactcaaatctccagtattcttgtcaaaaaaaaaaaaaaaaaagctcatattttgtatatatctgcttcagtggagaattatataggttgtgcaaattaacagtcctaactggtatagagcacctagtccagtgacctgctgggtaaactgtggatgatggttgcaaaagactaatttaaaaaataactaccaagaggccctgtctgtacctaacgccctatttttgcaatggctatatggcaagaaagctggtaaactatttgtctttcaggaccttttgaagtagtttgtataacttcttaaaagttgtgattccagataaccagctgtaacacagctgagagacttttaatcagacaaagtaattcctctcactaaactttacccaaaaactaaatctctaatatggcaaaaatggctagacacccattttcacattcccatctgtcaccaattggttaatctttcctgatggtacaggaaagctcagctactgatttttgtgatttagaactgtatgtcagacatccatgtttgtaaaactacacatccctaatgtgtgccatagagtttaacacaagtcctgtgaatttcttcactgttgaaaattattttaaacaaaatagaagctgtagtagccctttctgtgtgcaccttaccaactttctgtaaactcaaaacttaacatatttactaagccacaagaaatttgatttctattcaaggtggccaaattatttgtgtaatagaaaactgaaaatctaatattaaaaatatggaacttctaatatatttttatatttagttatagtttcagatatatatcatattggtattcactaatctgggaagggaagggctactgcagctttacatgcaatttattaaaatgattgtaaaatagcttgtatagtgtaaaataagaatgatttttagatgagattgttttatcatgacatgttatatattttttgtaggggtcaaagaaatgctgatggataacctatatgatttatagtttgtacatgcattcatacaggcagcgatggtctcagaaaccaaacagtttgctctaggggaagagggagatggagactggtcctgtgtgcagtgaaggttgctgaggctctgacccagtgagattacagaggaagttatcctctgcctcccattctgaccacccttctcattccaacagtgagtctgtcagcgcaggtttagtttactcaatctccccttgcactaaagtatgtaaagtatgtaaacaggagacaggaaggtggtgcttacatccttaaaggcaccatctaatagcgggttactttcacatacagccctcccccagcagttgaatgacaacagaagcttcagaagtttggcaatagtttgcatagaggtaccagcaatatgtaaatagtgcagaatctcataggttgccaataatacactaattcctttctatcctacaacaagagtttatttccaaataaaatgaggacatgtttttgttttctttgaatgctttttgaatgttatttgttattttcagtattttggagaaattatttaataaaaaaacaatcatttgctttttg

SEQ ID NO: 102 - protein, 777 aa, Homo sapiens
MDSKESLTPGREENPSSVLAQERGDVMDFYKTLRGGATVKVSASSPSLAVASQSDSKQRRLLVDFPKGSVSNAQQPDLSKAVSLSMGLYMGETETKVMGNDLGFPQQGQISLSSGETDLKLLEESIANLNRSTSVPENPKSSASTAVSAAPTEKEFPKTHSDVSSEQQHLKGQTGTNGGNVKLYTTDQSTFDILQDLEFSSGSPGKETNESPWRSDLLIDENCLLSPLAGEDDSFLLEGNSNEDCKPLILPDTKPKIKDNGDLVLSSPSNVTLPQVKTEKEDFIELCTPGVIKQEKLGTVYCQASFPGANIIGNKMSAISVHGVSTSGGQMYHYDMNTASLSQQQDQKPIFNVIPPIPVGSENWNRCQGSGDDNLTSLGTLNFPGRTVFSNGYSSPSMRPDVSSPPSSSSTATTGPPPKLCLVCSDEASGCHYGVLTCGSCKVFFKRAVEGQHNYLCAGRNDCIIDKIRRKNCPACRYRKCLQAGMNLEARKTKKKIKGIQQATTGVSQETSENPGNKTIVPATLPQLTPTLVSLLEVIEPEVLYAGYDSSVPDSTWRIMTTLNMLGGRQVIAAVKWAKAIPGFRNLHLDDQMTLLQYSWMFLMAFALGWRSYRQSSANLLCFAPDLIINEQRMTLPCMYDQCKHMLYVSSELHRLQVSYEEYLCMKTLLLLSSVPKDGLKSQELFDEIRMTYIKELGKAIVKREGNSSQNWQRFYQLTKLLDSMHEVVENLLNYCFQTFLDKTMSIEFPEMLAEIITNQIPKYSNGNIKKLLFHQK

SEQ ID NO: 103 - DNA, 5749 bp, Homo sapiens
  CDS (217)...(3171): MR (NR3C2)
cgcgggagccaacttcaggctgctcagaggaagcccgtgcagtcagtcacctgggtgcaagagcgttgctgcctcgggctctcccgctgcagggagagcggcactcgctggcctggatgtggttggatttaggggggctccgcagcaggggtttcgtggcggtggcaagcgctgcaacaggtagacggcgagagacggaccccggccgaggcagggatggagaccaaaggctaccacagtctccctgaaggtctagatatggaaagacggtggggtcaagtttctcaggctgtggagcgttcttccctgggacctacagagaggaccgatgagaataactacatggagattgtcaacgtaagctgtgtttccggtgctattccaaacaacagtactcaaggaagcagcaaagaaaaacaagaactactcccttgccttcagcaagacaataatcggcctgggattttaacatctgatattaaaactgagctggaatctaaggaactttcagcaactgtagctgagtccatgggtttatatatggattctgtaagagatgctgactattcctatgagcagcagaaccaacaaggaagcatgagtccagctaagatttatcagaatgttgaacagctggtgaaattttacaaaggaaatggccatcgtccttccactctaagttgtgtgaacacgcccttgagatcatttatgtctgactctgggagctccgtgaatggtggcgtcatgcgcgccattgttaaaagccctatcatgtgtcatgagaaaagcccgtctgtttgcagccctctgaacatgacatcttcggtttgcagccctgctggaatcaactctgtgtcctccaccacagccagctttggcagttttccagtgcacagcccaatcacccagggaactcctctgacatgctcccctaatgctgaaaatcgaggctccaggtcgcacagccctgcacatgctagcaatgtgggctctcctctctcaagtccgttaagtagcatgaaatcctcaatttccagccctccaagtcactgcagtgtaaaatctccagtctccagtcccaataatgtcactctgagatcctctgtgtctagccctgcaaatattaacaactcaaggtgctctgtttccagcccttcgaacactaataacagatccacgctttccagtccggcagccagtactgtgggatctatctgtagccctgtaaacaatgccttcagctacactgcttctggcacctctgctggatccagtacattgcgggatgtggttcccagtccagacacgcaggagaaaggtgctcaagaggtcccttttcctaagactgaggaagtagagagtgccatctcaaatggtgtgactggccagcttaatattgtccagtacataaaaccagaaccagatggagcttttagcagctcatgtctaggaggaaatagcaaaataaattcggattcttcattctcagtaccaataaagcaagaatcaaccaagcattcatgttcaggcacctcttttaaagggaatccaacagtaaacccgtttccatttatggatggctcgtatttttcctttatggatgataaagactattattccctatcaggaattttaggaccacctgtgcccggctttgatggtaactgtgaaggcagcggattcccagtgggtattaaacaagaaccagatgacgggagctattacccagaggccagcatcccttcctctgctattgttggggtgaattcaggtggacagtccttccactacaggattggtgctcaaggtacaatatctttatcacgatcggctagagaccaatctttccaacacctgagttcctttcctcctgtcaatactttagtggagtcatggaaatcacacggcgacctgtcgtctagaagaagtgatgggtatccggtcttagaatacattccagaaaatgtatcaagctctactttacgaagtgtttctactggatcttcaagaccttcaaaaatatgtttggtgtgtggggatgaggcttcaggatgccattatggggtagtcacctgtggcagctgcaaagttttcttcaaaagagcagtggaagggcaacacaactatttatgtgctggaagaaatgattgcatcattgataagattcgacgaaagaattgtcctgcttgcagacttcagaaatgtcttcaagctggaatgaatttaggagcacgaaagtcaaagaagttgggaaagttaaaagggattcacgaggagcagccacagcagcagcagcccccacccccacccccacccccgcaaagcccagaggaagggacaacgtacatcgctcctgcaaaagaaccctcggtcaacacagcactggttcctcagctctccacaatctcacgagcgctcacaccttcccccgttatggtccttgaaaacattgaacctgaaattgtatatgcaggctatgacagctcaaaaccagatacagccgaaaatctgctctccacgctcaaccgcttagcaggcaaacagatgatccaagtcgtgaagtgggcaaaggtacttccaggatttaaaaacttgcctcttgaggaccaaattaccctaatccagtattcttggatgtgtctatcatcatttgccttgagctggagatcgtacaaacatacgaacagccaatttctctattttgcaccagacctagtctttaatgaagagaagatgcatcagtctgccatgtatgaactatgccaggggatgcaccaaatcagccttcagttcgttcgactgcagctcacctttgaagaatacaccatcatgaaagttttgctgctactaagcacaattccaaaggatggcctcaaaagccaggctgcatttgaagaaatgaggacaaattacatcaaagaactgaggaagatggtaactaagtgtcccaacaattctgggcagagctggcagaggttctaccaactgaccaagctgctggactccatgcatgacctggtgagcgacctgctggaattctgcttctacaccttccgagagtcccatgcgctgaaggtagagttccccgcaatgctggtggagatcatcagcgaccagctgcccaaggtggagtcggggaacgccaagccgctctacttccaccggaagtgactgcccgctgcccagaagaactttgccttaagtttccctgtgttgttccacacccagaaggacccaagaaaacctgtttttaacatgtgatggttgattcacacttgttcaacagtttctcaagtttaaagtcatgtcagaggtttggagccgggaaagctgtttttccgtggatttggcgagaccagagcagtctgaaggattccccacctccaatcccccagcgcttagaaacatgttcctgttcctcgggatgaaaagccatatctagtcaataactctgattttgatattttcacagatggaagaagttttaactatgccgtgtagtttctggtatcgttcgcttgttttaaaagggttcaaggactaacgaacgttttaaagcttacccttggtttgcacataaaacgtatagtcaatatggggcattaatattcttttgttattaaaaaaacacaaaaaaataataaaaaaatatatacagattcctgttgtgtaataacagaactcgtggcgtggggcagcagctgcctctgagccctcgctcgtccacggtcttctgcatcactggtatacacactcgttagcgtccatttcttatttaattagaatggataagatgatgttaaatgccttggtttgatttctagtatctattgtgttggctttacaaataattttttgcagtcttttgctgtgctgtacattactgtatgtataaattatgaaggacctgaaataaggtataaggatcttttgtaaatgagacacatacaaaaaaaatctttaatggttaataggatgaatgggaaagtatttttgaaagaattctattttgctggagactatttaagtactatctttgtctaaacaaggtaatttttttttgtaaagtgcaatgtcctgcatgcataatgaaccgtttacagtgtatttaagaaagggaaagctgtgccttttttagcttcatatctaatttaccattattttacagtctctgttgtaaataaccacactgaaacctcttcggttgtcttgaaacctttctactttttctgtactttttgttttgttcttggtctcccgcttggggcatttgtgggactccagcacgttttctggcttctgcttcatcctgctccatcggggaatgacacactgcggtgtctgcagctcctggaaggtgtcatttgacaacacatgtgggagaggaggtccttggagtgctgcagctttgggaaagcctgcctcgtttcccttttcctctagaagcagaaccagctctacgagagtgagactgggaacttgatggctcagagagcatcttttcctcccattttagaaaatcagattttctcctgtgggaaaaaaaaattccatgcactctctctctgttaaagatcagctattcccttctgatcttggaaagaggttctgcactcctggaaccggtcacaggaacgcacagatcatggcaggatgcgctgggacggcccatcttggcaaggttcagtctgaatggcatggagaccgggagatagaggggttttagatttttaaaaggtaggttttaaaaataagttttatacataaacagttttggagaaaaattacagatcatataagcaagacagtggcactaaaatgtttaattcattaatctgtttgtttggcactgatgcaatgtatggcttttctcttgccccaaatcacaaacatatgtatctttggggaaactaacaatatgattgcactaaataaactactttgaatagaggccaaattaatcttttaaaaatgatgataatcatcaggtttactcagtgaaatcatattaattattttccaaaatctaaaagctgtagctggagaagcccatggccacgaggaagcagcaattaattagatcaacacttttctccagggttcaccatgcaggcaacattaccttgtctttcaaaagacacctgccttagtgcaaggggaaacctgtgaaagctgcactcagagggaggagtctttcttacataatttgcaatttcaggaatttaatttataggcagatctttaaatacagtcaacttacggtgcacagtaatatgaaagccacactttgaaggtaataaatacacagcatgcagactgggagttgctagcaaacaaatggcttacttacaaaagcagcttttagttcagacttagtttttataaaatgagaattctgacttacttaaccaggtttgggatggagatggtctgcatcagctttttgtattaacaaagttactggctctttgtgtgtctccaggtaactttgcttgattaaacagcaaagccatattctaaattcactgttgaatgcctgtcccagtccaaattgtctgtctgctcttatttttgtaccatattgctcttaaaaatcttggtttggtacagttcataattcaccaaaaagttcatataatttaaagaaacactaaattagtttaaaatgaagcaatttatatctttatgcaaaaacatatgtctgtctttgcaaaggactgtaagcagattacaataaatcctttacttt

SEQ ID NO: 104 - protein, 984 aa, Homo sapiens
METKGYHSLPEGLDMERRWGQVSQAVERSSLGPTERTDENNYMEIVNVSCVSGAIPNNSTQGSSKEKQELLPCLQQDNNRPGILTSDIKTELESKELSATVAESMGLYMDSVRDADYSYEQQNQQGSMSPAKIYQNVEQLVKFYKGNGHRPSTLSCVNTPLRSFMSDSGSSVNGGVMRAIVKSPIMCHEKSPSVCSPLNMTSSVCSPAGINSVSSTTASFGSFPVHSPITQGTPLTCSPNAENRGSRSHSPAHASNVGSPLSSPLSSMKSSISSPPSHCSVKSPVSSPNNVTLRSSVSSPANINNSRCSVSSPSNTNNRSTLSSPAASTVGSICSPVNNAFSYTASGTSAGSSTLRDVVPSPDTQEKGAQEVPFPKTEEVESAISNGVTGQLNIVQYIKPEPDGAFSSSCLGGNSKINSDSSFSVPIKQESTKHSCSGTSFKGNPTVNPFPFMDGSYFSFMDDKDYYSLSGILGPPVPGFDGNCEGSGFPVGIKQEPDDGSYYPEASIPSSAIVGVNSGGQSFHYRIGAQGTISLSRSARDQSFQHLSSFPPVNTLVESWKSHGDLSSRRSDGYPVLEYIPENVSSSTLRSVSTGSSRPSKICLVCGDEASGCHYGVVTCGSCKVFFKRAVEGQHNYLCAGRNDCIIDKIRRKNCPACRLQKCLQAGMNLGARKSKKLGKLKGIHEEQPQQQQPPPPPPPPQSPEEGTTYIAPAKEPSVNTALVPQLSTISRALTPSPVMVLENIEPEIVYAGYDSSKPDTAENLLSTLNRLAGKQMIQVVKWAKVLPGFKNLPLEDQITLIQYSWMCLSSFALSWRSYKHTNSQFLYFAPDLVFNEEKMHQSAMYELCQGMHQISLQFVRLQLTFEEYTIMKVLLLLSTIPKDGLKSQAAFEEMRTNYIKELRKMVTKCPNNSGQSWQRFYQLTKLLDSMHDLVSDLLEFCFYTFRESHALKVEFPAMLVEIISDQLPKVESGNAKPLYFHRK

SEQ ID NO: 105 - DNA, 5003 bp, Homo sapiens
  CDS (1455)...(4256): PR (NR3C3)
ggatccattttataagctcaaagataattacttttcagactaagaatatttagggtaaaaagtactgttcaacatctctactgaggatgttatgatgtagcacactctataagctggagctaaaggaaactttccttaaagtgctatttactaaaaattggaacacattccttaagacaaatcgaagtgtggcacacaacatccaaacttccatcatagatacagaggtgttaccatctcccactcccaaatttctttgtcacgctgaggatactcaagaggagcaggacatgttggtcgcagcaggagaaacttgaaagcattcacttttatggaactcataagggagagaatctcttatttagtatcgtccttgatacatttattattttaaaagataatgtagccaaatgtcttcctctgtgttaaatctttacaaaactgaaatcttaaaatggtgacaaaaattctacttctgatagaatctattcatttttccaattagatagggcataattcttaatttgcaaaacaaaacgtaatatgcttatgaggttccatcccaaagaacctgctattgagagtagcattcagaataacgggtggaaatgccaactccagagtttcagatcctaccggtaattggggtagggaggggctttgggcggggcctccctagaggaggaggcgttgttagaaagctgtctggccagtccacagctgtcactaatcggggtaagccttgttgtatttgcgcgtgtgggtggcattctcaatgagaactagcttcacttgtcatttgagtgaaatctacaacccgaggcggctagtgctcccgcactactgggatctgagatcttcggagatgactgtcgcccgcagtacggagccagcagaagtccgacccttcctgggaatgggctgtaccgagaggtccgactagccccagggttttagtgagggggcagtggaactcagcgagggactgagagcttcacagcatgcacgagtttgatgccagagaaaaagtcgggagataaaggagccgcgtgtcactaaattgccgtcgcagccgcagccactcaagtgccggacttgtgagtactctgcgtctccagtcctcggacagaagttggagaactctcttggagaactccccgagttaggagacgagatctcctaacaattactactttttcttgcgctccccacttgccgctcgctgggacaaacgacagccacagttcccctgacgacaggatggaggccaagggcaggagctgaccagcgccgccctcccccgcccccgacccaggaggtggagatcctccggtccagccacattcaacacccactttctcctccctctgcccctatattcccgaaaccccctcctccttcccttttccctcctccctggagacgggggaggagaaaaggggagtccagtcgtcatgactgagctgaaggcaaagggtccccgggctccccacgtggcgggcggcccgccctcccccgaggtcggatccccactgctgtgtcgcccagccgcaggtccgttcccggggagccagacctcggacaccttgcctgaagtttcggccatacctatctccctggacgggctactcttccctcggccctgccagggacaggacccctccgacgaaaagacgcaggaccagcagtcgctgtcggacgtggagggcgcatattccagagctgaagctacaaggggtgctggaggcagcagttctagtcccccagaaaaggacagcggactgctggacagtgtcttggacactctgttggcgccctcaggtcccgggcagagccaacccagccctcccgcctgcgaggtcaccagctcttggtgcctgtttggccccgaacttcccgaagatccaccggctgcccccgccacccagcgggtgttgtccccgctcatgagccggtccgggtgcaaggttggagacagctccgggacggcagctgcccataaagtgctgccccggggcctgtcaccagcccggcagctgctgctcccggcctctgagagccctcactggtccggggccccagtgaagccgtctccgcaggccgctgcggtggaggttgaggaggaggatagctctgagtccgaggagtctgcgggtccgcttctgaagggcaaacctcgggctctgggtggcgcggcggctggaggaggagccgcggcttgtccgccgggggcggcagcaggaggcgtcgccctggtccccaaggaagattcccgcttctcagcgcccagggtcgccctggtggagcaggacgcgccgatggcgcccgggcgctccccgctggccaccacggtgatggatttcatccacgtgcctatcctgcctctcaatcacgccttattggcagcccgcactcggcagctgctggaagacgaaagttacgacggcggggccggggctgccagcgcctttgccccgccgcggacttcaccctgtgcctcgtccaccccggtcgctgtaggcgacttccccgactgcgcgtacccgcccgacgccgagcccaaggacgacgcgtaccctctctatagcgacttccagccgcccgctctaaagataaaggaggaggaggaaggcgcggaggcctccgcgcgctccccgcgttcctaccttgtggccggtgccaaccccgcagccttcccggatttcccgttggggccaccgcccccgctgccgccgcgagcgaccccatccagacccggggaagcggcggtgacggccgcacccgccagtgcctcagtctcgtctgcgtcctcctcggggtcgaccctggagtgcatcctgtacaaagcggagggcgcgccgccccagcagggcccgttcgcgccgccgccctgcaaggcgccgggcgcgagcggctgcctgctcccgcgggacggcctgccctccacctccgcctctgccgccgccgccggggcggcccccgcgctctaccctgcactcggcctcaacgggctcccgcagctcggctaccaggccgccgtgctcaaggagggcctgccgcaggtctacccgccctatctcaactacctgaggccggattcagaagccagccagagcccacaatacagcttcgagtcattacctcagaagatttgtttaatctgtggggatgaagcatcaggctgtcattatggtgtccttacctgtgggagctgtaaggtcttctttaagagggcaatggaagggcagcacaactacttatgtgctggaagaaatgactgcatcgttgataaaatccgcagaaaaaactgcccagcatgtcgccttagaaagtgctgtcaggctggcatggtccttggaggtcgaaaatttaaaaagttcaataaagtcagagttgtgagagcactggatgctgttgctctcccacagccattgggcgttccaaatgaaagccaagccctaagccagagattcactttttcaccaggtcaagacatacagttgattccaccactgatcaacctgttaatgagcattgaaccagatgtgatctatgcaggacatgacaacacaaaacctgacacctccagttctttgctgacaagtcttaatcaactaggcgagaggcaacttctttcagtagtcaagtggtctaaatcattgccaggttttcgaaacttacatattgatgaccagataactctcattcagtattcttggatgagcttaatggtgtttggtctaggatggagatcctacaaacatgtcagtgggcagatgctgtattttgcacctgatctaatactaaatgaacagcggatgaaagaatcatcattctattcattatgccttaccatgtggcagatcccacaggagtttgtcaagcttcaagttagccaagaagagttcctctgtatgaaagtattgttacttcttaatacaattcctttggaagggctacgaagtcaaacccagtttgaggagatgaggtcaagctacattagagagctcatcaaggcaattggtttgaggcaaaaaggagttgtgtcgagctcacagcgtttctatcaacttacaaaacttcttgataacttgcatgatcttgtcaaacagcttcatctgtactgcttgaatacatttatccagtcccgggcactgagtgttgaatttccagaaatgatgtctgaagttattgctgcacaattacccaagatattggcagggatggtgaaaccccttctctttcataaaaagtgaatgtcatctttttcttttaaagaattaaattttgtggcatgtctttttgttttggtcaggattatgaggtcttgagtttttataatgttcttctgaaagccttacatttataacatcatagtgtgtaaatttaaaagaaaaattgtgaggttctaattattttcttttataaagtataattagaatgtttaactgttttgtttacccatattttcttgaagaatttacaagattgaaaaagtactaaaattgttaaagtaaactatatcttatccatattatttcataccatgtaggtgaggatttttaacttttgcatctaacaaatcatcgacttaagagaaaaaatcttacatgtaataacacaaagctattatatgttatttctaggtaactccctttgtgtcaattatatttccaaaaatgaacctttaaaatggtatgcaaaattttgtctatatatatttgtgtgaggaggaaattcataactttcctcagattttcaaaagtatttttaatgcaaaaaatgtagaaagagtttaaaaccactaaaatagattgatgttcttcaaactaggcaaaacaactcatatgttaagaccattttccagattggaaacacaaatctcttaggaagttaataagtagattcatatcattatacaaatagtattgtgggttttgtaggtttttaaaataaccttttttggggagagaattgtcctctaatgaggtattgcgagtggc

SEQ ID NO: 106 - protein, 933 aa, Homo sapiens
MTELKAKGPRAPHVAGGPPSPEVGSPLLCRPAAGPFPGSQTSDTLPEVSAIPISLDGLLFPRPCQGQDPSDEKTQDQQSLSDVEGAYSRAEATRGAGGSSSSPPEKDSGLLDSVLDTLLAPSGPGQSQPSPPACEVTSSWCLFGPELPEDPPAAPATQRVLSPLMSRSGCKVGDSSGTAAAHKVLPRGLSPARQLLLPASESPHWSGAPVKPSPQAAAVEVEEEDSSESEESAGPLLKGKPRALGGAAAGGGAAACPPGAAAGGVALVPKEDSRFSAPRVALVEQDAPMAPGRSPLATTVMDFIHVPILPLNHALLAARTRQLLEDESYDGGAGAASAFAPPRTSPCASSTPVAVGDFPDCAYPPDAEPKDDAYPLYSDFQPPALKIKEEEEGAEASARSPRSYLVAGANPAAFPDFPLGPPPPLPPRATPSRPGEAAVTAAPASASVSSASSSGSTLECILYKAEGAPPQQGPFAPPPCKAPGASGCLLPRDGLPSTSASAAAAGAAPALYPALGLNGLPQLGYQAAVLKEGLPQVYPPYLNYLRPDSEASQSPQYSFESLPQKICLICGDEASGCHYGVLTCGSCKVFFKRAMEGQHNYLCAGRNDCIVDKIRRKNCPACRLRKCCQAGMVLGGRKFKKFNKVRVVRALDAVALPQPLGVPNESQALSQRFTFSPGQDIQLIPPLINLLMSIEPDVIYAGHDNTKPDTSSSLLTSLNQLGERQLLSVVKWSKSLPGFRNLHIDDQITLIQYSWMSLMVFGLGWRSYKHVSGQMLYFAPDLILNEQRMKESSFYSLCLTMWQIPQEFVKLQVSQEEFLCMKVLLLLNTIPLEGLRSQTQFEEMRSSYIRELIKAIGLRQKGVVSSSQRFYQLTKLLDNLHDLVKQLHLYCLNTFIQSRALSVEFPEMMSEVIAAQLPKILAGMVKPLLFHKK

SEQ ID NO: 107 - DNA, 4314 bp, Homo sapiens
  CDS (1116)...(3878): AR (NR3C4)
cgagatcccggggagccagcttgctgggagagcgggacggtccggagcaagcccagaggcagaggaggcgacagagggaaaaagggccgagctagccgctccagtgctgtacaggagccgaagggacgcaccacgccagccccagcccggctccagcgacagccaacgcctcttgcagcgcggcggcttcgaagccgccgcccggagctgccctttcctcttcggtgaagtttttaaaagctgctaaagactcggaggaagcaaggaaagtgcctggtaggactgacggctgcctttgtcctcctcctctccaccccgcctccccccaccctgccttccccccctcccccgtcttctctcccgcagctgcctcagtcggctactctcagccaacccccctcaccacccttctccccacccgcccccccgcccccgtcggcccagcgctgccagcccgagtttgcagagaggtaactccctttggctgcgagcgggcgagctagctgcacattgcaaagaaggctcttaggagccaggcgactggggagcggcttcagcactgcagccacgacccgcctggttaggctgcacgcggagagaaccctctgttttcccccactctctctccacctcctcctgccttccccaccccgagtgcggagccagagatcaaaagatgaaaaggcagtcaggtcttcagtagccaaaaaacaaaacaaacaaaaacaaaaaagccgaaataaaagaaaaagataataactcagttcttatttgcacctacttcagtggacactgaatttggaaggtggaggattttgtttttttcttttaagatctgggcatcttttgaatctacccttcaagtattaagagacagactgtgagcctagcagggcagatcttgtccaccgtgtgtcttcttctgcacgagactttgaggctgtcagagcgctttttgcgtggttgctcccgcaagtttccttctctggagcttcccgcaggtgggcagctagctgcagcgactaccgcatcatcacagcctgttgaactcttctgagcaagagaaggggaggcggggtaagggaagtaggtggaagattcagccaagctcaaggatggaagtgcagttagggctgggaagggtctaccctcggccgccgtccaagacctaccgaggagctttccagaatctgttccagagcgtgcgcgaagtgatccagaacccgggccccaggcacccagaggccgcgagcgcagcacctcccggcgccagtttgctgctgctgcagcagcagcagcagcagcagcagcagcagcagcagcagcagcagcagcagcagcagcagcagcagcaagagactagccccaggcagcagcagcagcagcagggtgaggatggttctccccaagcccatcgtagaggccccacaggctacctggtcctggatgaggaacagcaaccttcacagccgcagtcggccctggagtgccaccccgagagaggttgcgtcccagagcctggagccgccgtggccgccagcaaggggctgccgcagcagctgccagcacctccggacgaggatgactcagctgccccatccacgttgtccctgctgggccccactttccccggcttaagcagctgctccgctgaccttaaagacatcctgagcgaggccagcaccatgcaactccttcagcaacagcagcaggaagcagtatccgaaggcagcagcagcgggagagcgagggaggcctcgggggctcccacttcctccaaggacaattacttagggggcacttcgaccatttctgacaacgccaaggagttgtgtaaggcagtgtcggtgtccatgggcctgggtgtggaggcgttggagcatctgagtccaggggaacagcttcggggggattgcatgtacgccccacttttgggagttccacccgctgtgcgtcccactccttgtgccccattggccgaatgcaaaggttctctgctagacgacagcgcaggcaagagcactgaagatactgctgagtattcccctttcaagggaggttacaccaaagggctagaaggcgagagcctaggctgctctggcagcgctgcagcagggagctccgggacacttgaactgccgtctaccctgtctctctacaagtccggagcactggacgaggcagctgcgtaccagagtcgcgactactacaactttccactggctctggccggaccgccgccccctccgccgcctccccatccccacgctcgcatcaagctggagaacccgctggactacggcagcgcctgggcggctgcggcggcgcagtgccgctatggggacctggcgagcctgcatggcgcgggtgcagcgggacccggttctgggtcaccctcagccgccgcttcctcatcctggcacactctcttcacagccgaagaaggccagttgtatggaccgtgtggtggtggtgggggtggtggcggcggcggcggcggcggcggcggcggcggcggcggcggcggcggcggcgaggcgggagctgtagccccctacggctacactcggccccctcaggggctggcgggccaggaaagcgacttcaccgcacctgatgtgtggtaccctggcggcatggtgagcagagtgccctatcccagtcccacttgtgtcaaaagcgaaatgggcccctggatggatagctactccggaccttacggggacatgcgtttggagactgccagggaccatgttttgcccattgactattactttccaccccagaagacctgcctgatctgtggagatgaagcttctgggtgtcactatggagctctcacatgtggaagctgcaaggtcttcttcaaaagagccgctgaagggaaacagaagtacctgtgcgccagcagaaatgattgcactattgataaattccgaaggaaaaattgtccatcttgtcgtcttcggaaatgttatgaagcagggatgactctgggagcccggaagctgaagaaacttggtaatctgaaactacaggaggaaggagaggcttccagcaccaccagccccactgaggagacaacccagaagctgacagtgtcacacattgaaggctatgaatgtcagcccatctttctgaatgtcctggaagccattgagccaggtgtagtgtgtgctggacacgacaacaaccagcccgactcctttgcagccttgctctctagcctcaatgaactgggagagagacagcttgtacacgtggtcaagtgggccaaggccttgcctggcttccgcaacttacacgtggacgaccagatggctgtcattcagtactcctggatggggctcatggtgtttgccatgggctggcgatccttcaccaatgtcaactccaggatgctctacttcgcccctgatctggttttcaatgagtaccgcatgcacaagtcccggatgtacagccagtgtgtccgaatgaggcacctctctcaagagtttggatggctccaaatcaccccccaggaattcctgtgcatgaaagcactgctactcttcagcattattccagtggatgggctgaaaaatcaaaaattctttgatgaacttcgaatgaactacatcaaggaactcgatcgtatcattgcatgcaaaagaaaaaatcccacatcctgctcaagacgcttctaccagctcaccaagctcctggactccgtgcagcctattgcgagagagctgcatcagttcacttttgacctgctaatcaagtcacacatggtgagcgtggactttccggaaatgatggcagagatcatctctgtgcaagtgcccaagatcctttctgggaaagtcaagcccatctatttccacacccagtgaagcattggaaaccctatttccccaccccagctcatgccccctttcagatgtcttctgcctgttataactctgcactactcctctgcagtgccttggggaatttcctctattgatgtacagtctgtcatgaacatgttcctgaattctatttgctgggctttttttttctctttctctcctttctttttcttcttccctccctatctaaccctcccatggcaccttcagactttgcttcccattgtggctcctatctgtgttttgaatggtgttgtatgcctttaaatctgtgatgatcctcatatggcccagtgtcaagttgtgcttgtttacagcactactctgtgccagccacacaaacgtttacttatcttatgccacgggaagtttagagagctaagattatctggggaaatcaaaacaaaaacaagcaaac

SEQ ID NO: 108 - protein, 920 aa, Homo sapiens
MEVQLGLGRVYPRPPSKTYRGAFQNLFQSVREVIQNPGPRHPEAASAAPPGASLLLLQQQQQQQQQQQQQQQQQQQQQQQETSPRQQQQQQGEDGSPQAHRRGPTGYLVLDEEQQPSQPQSALECHPERGCVPEPGAAVAASKGLPQQLPAPPDEDDSAAPSTLSLLGPTFPGLSSCSADLKDILSEASTMQLLQQQQQEAVSEGSSSGRAREASGAPTSSKDNYLGGTSTISDNAKELCKAVSVSMGLGVEALEHLSPGEQLRGDCMYAPLLGVPPAVRPTPCAPLAECKGSLLDDSAGKSTEDTAEYSPFKGGYTKGLEGESLGCSGSAAAGSSGTLELPSTLSLYKSGALDEAAAYQSRDYYNFPLALAGPPPPPPPPHPHARIKLENPLDYGSAWAAAAAQCRYGDLASLHGAGAAGPGSGSPSAAASSSWHTLFTAEEGQLYGPCGGGGGGGGGGGGGGGGGGGGGGGEAGAVAPYGYTRPPQGLAGQESDFTAPDVWYPGGMVSRVPYPSPTCVKSEMGPWMDSYSGPYGDMRLETARDHVLPIDYYFPPQKTCLICGDEASGCHYGALTCGSCKVFFKRAAEGKQKYLCASRNDCTIDKFRRKNCPSCRLRKCYEAGMTLGARKLKKLGNLKLQEEGEASSTTSPTEETTQKLTVSHIEGYECQPIFLNVLEAIEPGVVCAGHDNNQPDSFAALLSSLNELGERQLVHVVKWAKALPGFRNLHVDDQMAVIQYSWMGLMVFAMGWRSFTNVNSRMLYFAPDLVFNEYRMHKSRMYSQCVRMRHLSQEFGWLQITPQEFLCMKALLLFSIIPVDGLKNQKFFDELRMNYIKELDRIIACKRKNPTSCSRRFYQLTKLLDSVQPIARELHQFTFDLLIKSHMVSVDFPEMMAEIISVQVPKILSGKVKPIYFHTQ

SEQ ID NO: 109 - DNA, 2699 bp, Homo sapiens
  CDS (315)...(2111): Nurr77 (NR4A1) variant 1
ggagcgcttaagaggagggtcgggctcggccggggagtcccagtggcggaggctacgaaacttgggggagtgcacagaagaacttcgggagcgcacgcgggaccagggaccaggctgagactcggggcgccagtccgggcaggggcagcgggagccggccgggtagggtgcagcctgaggcttgttcagcagaacaggtgcaagccacattgttgccaagacctgcctgaagccggattctccccactgcctccttcaaccccgcctcttcctcctcctgtgggactgctcccccctcctgtgaggctagatagatgccctgtatccaagcccaatatgggacaccagcaccgagtccgggaccccgtgaccacctggcaagcgaccccctgacccctgagttcatcaagcccaccatggacctggccagccccgaggcagcccccgctgcccccactgccctgcccagcttcagcaccttcatggacggctacacaggagagtttgacaccttcctctaccagctgccaggaacagtccagccatgctcctcagcctcctcctcggcctcctccacatcctcgtcctcagccacctcccctgcctctgcctccttcaagttcgaggacttccaggtgtacggctgctaccccggccccctgagcggcccagtggatgaggccctgtcctccagtggctctgactactatggcagcccctgctcggccccgtcgccctccacgcccagcttccagccgccccagctctctccctgggatggctccttcggccacttctcgcccagccagacttacgaaggcctgcgggcatggacagagcagctgcccaaagcctctgggcccccacagcctccagccttcttttccttcagtcctcccaccggccccagccccagcctggcccagagccccctgaagttgttcccctcacaggccacccaccagctgggggagggagagagctattccatgcctacggccttcccaggtttggcacccacttctccacaccttgagggctcggggatactggatacacccgtgacctcaaccaaggcccggagcggggccccaggtggaagtgaaggccgctgtgctgtgtgtggggacaacgcttcatgccagcattatggtgtccgcacatgtgagggctgcaagggcttcttcaagcgcacagtgcagaaaaacgccaagtacatctgcctggctaacaaggactgccctgtggacaagaggcggcgaaaccgctgccagttctgccgcttccagaagtgcctggcggtgggcatggtgaaggaagttgtccgaacagacagcctgaaggggcggcggggccggctaccttcaaaacccaagcagcccccagatgcctcccctgccaatctcctcacttccctggtccgtgcacacctggactcagggcccagcactgccaaactggactactccaagttccaggagctggtgctgccccactttgggaaggaagatgctggggatgtacagcagttctacgacctgctctccggttctctggaggtcatccgcaagtgggcggagaagatccctggctttgctgagctgtcaccggctgaccaggacctgttgctggagtcggccttcctggagctcttcatcctccgcctggcgtacaggtctaagccaggcgagggcaagctcatcttctgctcaggcctggtgctacaccggctgcagtgtgcccgtggcttcggggactggattgacagtatcctggccttctcaaggtccctgcacagcttgcttgtcgatgtccctgccttcgcctgcctctctgcccttgtcctcatcaccgaccggcatgggctgcaggagccgcggcgggtggaggagctgcagaaccgcatcgccagctgcctgaaggagcacgtggcagctgtggcgggcgagccccagccagccagctgcctgtcacgtctgttgggcaaactgcccgagctgcggaccctgtgcacccagggcctgcagcgcatcttctacctcaagctggaggacttggtgccccctccacccatcattgacaagatcttcatggacacgctgcccttctgacccctgcctgggaacacgtgtgcacatgcgcactctcatatgccaccccatgtgcctttagtccacggacccccagagcacccccaagcctgggcttgagctgcagaatgactccaccttctcacctgctccaggaggtttgcagggagctcaagcccttggggagggggatgccttcatgggggtgaccccacgatttgtcttatcccccccagcctggccccggcctttatgttttttgtaagataaaccgtttttaacacatagcgccgtgctgtaaataagcccagtgctgctgtaaatacaggaagaaagagcttgaggtgggagcggggctgggaggaagggatgggccccgccttcctgggcagcctttccagcctcctgctggctctctcttcctaccctccttccacatgtacataaactgtcactctaggaagaagacaaatgacagattctgacatttatatttgtgtattttcctggatttatagtatgtgacttttctgattaatatatttaatatattgaataaaaaatagacatgtagttggaaaaaaaaaaaaaaaaaaaaaaaaaaaaaaa

SEQ ID NO: 110 - protein, 598 aa, Homo sapiens
MPCIQAQYGTPAPSPGPRDHLASDPLTPEFIKPTMDLASPEAAPAAPTALPSFSTFMDGYTGEFDTFLYQLPGTVQPCSSASSSASSTSSSSATSPASASFKFEDFQVYGCYPGPLSGPVDEALSSSGSDYYGSPCSAPSPSTPSFQPPQLSPWDGSFGHFSPSQTYEGLRAWTEQLPKASGPPQPPAFFSFSPPTGPSPSLAQSPLKLFPSQATHQLGEGESYSMPTAFPGLAPTSPHLEGSGILDTPVTSTKARSGAPGGSEGRCAVCGDNASCQHYGVRTCEGCKGFFKRTVQKNAKYICLANKDCPVDKRRRNRCQFCRFQKCLAVGMVKEVVRTDSLKGRRGRLPSKPKQPPDASPANLLTSLVRAHLDSGPSTAKLDYSKFQELVLPHFGKEDAGDVQQFYDLLSGSLEVIRKWAEKIPGFAELSPADQDLLLESAFLELFILRLAYRSKPGEGKLIFCSGLVLHRLQCARGFGDWIDSILAFSRSLHSLLVDVPAFACLSALVLITDRHGLQEPRRVEELQNRIASCLKEHVAAVAGEPQPASCLSRLLGKLPELRTLCTQGLQRIFYLKLEDLVPPPPIIDKIFMDTLPF

SEQ ID NO: 111 - DNA, 2549 bp, Homo sapiens
  CDS (165)...(1961): Nurr77 (NR4A1) variant 2
ggagcgcttaagaggagggtcgggctcggccggggagtcccagtggcggaggctacgaaacttgggggagtgcacagaagaacttcgggagcgcacgcgggaccagggaccaggctgagactcggggcgccagtccgggcaggggcagcgggagccggccggagatgccctgtatccaagcccaatatgggacaccagcaccgagtccgggaccccgtgaccacctggcaagcgaccccctgacccctgagttcatcaagcccaccatggacctggccagccccgaggcagcccccgctgcccccactgccctgcccagcttcagcaccttcatggacggctacacaggagagtttgacaccttcctctaccagctgccaggaacagtccagccatgctcctcagcctcctcctcggcctcctccacatcctcgtcctcagccacctcccctgcctctgcctccttcaagttcgaggacttccaggtgtacggctgctaccccggccccctgagcggcccagtggatgaggccctgtcctccagtggctctgactactatggcagcccctgctcggccccgtcgccctccacgcccagcttccagccgccccagctctctccctgggatggctccttcggccacttctcgcccagccagacttacgaaggcctgcgggcatggacagagcagctgcccaaagcctctgggcccccacagcctccagccttcttttccttcagtcctcccaccggccccagccccagcctggcccagagccccctgaagttgttcccctcacaggccacccaccagctgggggagggagagagctattccatgcctacggccttcccaggtttggcacccacttctccacaccttgagggctcggggatactggatacacccgtgacctcaaccaaggcccggagcggggccccaggtggaagtgaaggccgctgtgctgtgtgtggggacaacgcttcatgccagcattatggtgtccgcacatgtgagggctgcaagggcttcttcaagcgcacagtgcagaaaaacgccaagtacatctgcctggctaacaaggactgccctgtggacaagaggcggcgaaaccgctgccagttctgccgcttccagaagtgcctggcggtgggcatggtgaaggaagttgtccgaacagacagcctgaaggggcggcggggccggctaccttcaaaacccaagcagcccccagatgcctcccctgccaatctcctcacttccctggtccgtgcacacctggactcagggcccagcactgccaaactggactactccaagttccaggagctggtgctgccccactttgggaaggaagatgctggggatgtacagcagttctacgacctgctctccggttctctggaggtcatccgcaagtgggcggagaagatccctggctttgctgagctgtcaccggctgaccaggacctgttgctggagtcggccttcctggagctcttcatcctccgcctggcgtacaggtctaagccaggcgagggcaagctcatcttctgctcaggcctggtgctacaccggctgcagtgtgcccgtggcttcggggactggattgacagtatcctggccttctcaaggtccctgcacagcttgcttgtcgatgtccctgccttcgcctgcctctctgcccttgtcctcatcaccgaccggcatgggctgcaggagccgcggcgggtggaggagctgcagaaccgcatcgccagctgcctgaaggagcacgtggcagctgtggcgggcgagccccagccagccagctgcctgtcacgtctgttgggcaaactgcccgagctgcggaccctgtgcacccagggcctgcagcgcatcttctacctcaagctggaggacttggtgccccctccacccatcattgacaagatcttcatggacacgctgcccttctgacccctgcctgggaacacgtgtgcacatgcgcactctcatatgccaccccatgtgcctttagtccacggacccccagagcacccccaagcctgggcttgagctgcagaatgactccaccttctcacctgctccaggaggtttgcagggagctcaagcccttggggagggggatgccttcatgggggtgaccccacgatttgtcttatcccccccagcctggccccggcctttatgttttttgtaagataaaccgtttttaacacatagcgccgtgctgtaaataagcccagtgctgctgtaaatacaggaagaaagagcttgaggtgggagcggggctgggaggaagggatgggccccgccttcctgggcagcctttccagcctcctgctggctctctcttcctaccctccttccacatgtacataaactgtcactctaggaagaagacaaatgacagattctgacatttatatttgtgtattttcctggatttatagtatgtgacttttctgattaatatatttaatatattgaataaaaaatagacatgtagttggaaaaaaaaaaaaaaaaaaaaaaaaaaaaaaa

SEQ ID NO: 112 - protein, 598 aa, Homo sapiens; identical to SEQ ID NO: 110

SEQ ID NO: 113 - DNA, 1842 bp, Homo sapiens
  CDS (203)...(1180): Nurr77 (NR4A1) variant 3
ggaggcagcaccacatccagagctcgctcagctgctgcccagcctcggctgtgaggataggctggctgggcagcacgtctctccccacagggctccctgagaccaccaggaagagcccccaaccaatcttgggattctcccttcgtgcggttgtctgggacctttttccagggtcaaagcagatcgtgaggaggaagctgagatgccctgtatccaagcccaatatgggacaccagcaccgagtccgggaccccgtgaccacctggcaagcgaccccctgacccctgagttcatcaagcccaccatggacctggccagccccgaggcagcccccgctgcccccactgccctgcccagcttcagcaccttcatggacggctacacaggagagtttgacaccttcctctaccagctgccaggaacagtccagccatgctcctcagcctcctcctcggcctcctccacatcctcgtcctcagccacctcccctgcctctgcctccttcaagttcgaggacttccaggtgtacggctgctaccccggccccctgagcggcccagtggatgaggccctgtcctccagtggctctgactactatggcagcccctgctcggccccgtcgccctccacgcccagcttccagccgccccagctctctccctgggatggctccttcggccacttctcgcccagccagacttacgaaggcctgcgggcatggacagagcagctgcccaaagcctctgggcccccacagcctccagccttcttttccttcagtcctcccaccggccccagccccagcctggcccagagccccctgaagttgttcccctcacaggccacccaccagctgggggagggagagagctattccatgcctacggccttcccaggtttggcacccacttctccacaccttgagggctcggggatactggatacacccgtgacctcaaccaaggcccggagcggggccccaggtggaagtgaaggccgctgtgctgtgtgtggggacaacgcttcatgccagcattatggtgtccgcacatgtgagggctgcaagggcttcttcaaggtaccgcgcagccccaggtggggccttttgttggaaatggagagaggctggcctcatcccattgggacctgtggtctccccctgggttctcctcctagctaagtcctgtcctgcagggtgggatcagccctgccaggtgggccgccttcctggagacccgtagatgccagggctggaagctttcatttgccgggacactcgggcccatgggattgcacagagctggagggaggggtgagataggggcagataggagctgcaggggtgcctggcgagcctctggttttcctctgctcctctgcctgtcctctcccaactcaaggttctagtgggaaggggtgcccccaggctctcatgttcctggcgtgagatgaaaggatccctgcggagggtttggttcttgagggctgggggtggacttgggaacaggctgtgtgtttgtcccagcgatggtgcctgcttagcttcccgtccccaccccccagccccttggccctctcctgtctgccctagggagaaggcaggtggacaagggcccatgaaaaaatacaggtgtctagactgccagggagaccctggcccccagtagtgtgtcctggggacttcctcagagcgagaaacctcccccaatgtcttcaagacttttctctccccccgcccaaccccgtctctccctcccttgccacccaaatgttagaaaaatagctgtgaacagagagcgcttttgtctgcaatggcagcaggatctggacggtcccctcccc

SEQ ID NO: 114 - protein, 325 aa, Homo sapiens
MPCIQAQYGTPAPSPGPRDHLASDPLTPEFIKPTMDLASPEAAPAAPTALPSFSTFMDGYTGEFDTFLYQLPGTVQPCSSASSSASSTSSSSATSPASASFKFEDFQVYGCYPGPLSGPVDEALSSSGSDYYGSPCSAPSPSTPSFQPPQLSPWDGSFGHFSPSQTYEGLRAWTEQLPKASGPPQPPAFFSFSPPTGPSPSLAQSPLKLFPSQATHQLGEGESYSMPTAFPGLAPTSPHLEGSGILDTPVTSTKARSGAPGGSEGRCAVCGDNASCQHYGVRTCEGCKGFFKVPRSPRWGLLLEMERGWPHPIGTCGLPLGSPPS

SEQ ID NO: 115 - DNA, 3447 bp, Homo sapiens
  CDS (336)...(2132): Nurr1 (NR4A2) variant 1
ggccagtccgcccggcggctcgcgcacggctccgcggtcccttttgcctgtccagccggccgcctgtccctgctccctccctccgtgaggtgtccgggttcccttcgcccagctctcccacccctacccgaccccggcgcccgggctcccagagggaactgcacttcggcagagttgaatgaatgaagagagacgcggagaactcctaaggaggagattggacaggctggactccccattgcttttctaaaaatcttggaaactttgtccttcattgaattacgacactgtccacctttaatttcctcgaaaacgcctgtaactcggctgaagccatgccttgtgttcaggcgcagtatgggtcctcgcctcaaggagccagccccgcttctcagagctacagttaccactcttcgggagaatacagctccgatttcttaactccagagtttgtcaagtttagcatggacctcaccaacactgaaatcactgccaccacttctctccccagcttcagtacctttatggacaactacagcacaggctacgacgtcaagccaccttgcttgtaccaaatgcccctgtccggacagcagtcctccattaaggtagaagacattcagatgcacaactaccagcaacacagccacctgcccccccagtctgaggagatgatgccgcactccgggtcggtttactacaagccctcctcgcccccgacgcccaccaccccgggcttccaggtgcagcacagccccatgtgggacgacccgggatctctccacaacttccaccagaactacgtggccactacgcacatgatcgagcagaggaaaacgccagtctcccgcctctccctcttctcctttaagcaatcgccccctggcaccccggtgtctagttgccagatgcgcttcgacgggcccctgcacgtccccatgaacccggagcccgccggcagccaccacgtggtggacgggcagaccttcgctgtgcccaaccccattcgcaagcccgcgtccatgggcttcccgggcctgcagatcggccacgcgtctcagctgctcgacacgcaggtgccctcaccgccgtcgcggggctccccctccaacgaggggctgtgcgctgtgtgtggggacaacgcggcctgccaacactacggcgtgcgcacctgtgagggctgcaaaggcttctttaagcgcacagtgcaaaaaaatgcaaaatacgtgtgtttagcaaataaaaactgcccagtggacaagcgtcgccggaatcgctgtcagtactgccgatttcagaagtgcctggctgttgggatggtcaaagaagtggttcgcacagacagtttaaaaggccggagaggtcgtttgccctcgaaaccgaagagcccacaggagccctctcccccttcgcccccggtgagtctgatcagtgccctcgtcagggcccatgtcgactccaacccggctatgaccagcctggactattccaggttccaggcgaaccctgactatcaaatgagtggagatgacacccagcatatccagcaattctatgatctcctgactggctccatggagatcatccggggctgggcagagaagatccctggcttcgcagacctgcccaaagccgaccaagacctgctttttgaatcagctttcttagaactgtttgtccttcgattagcatacaggtccaacccagtggagggtaaactcatcttttgcaatggggtggtcttgcacaggttgcaatgcgttcgtggctttggggaatggattgattccattgttgaattctcctccaacttgcagaatatgaacatcgacatttctgccttctcctgcattgctgccctggctatggtcacagagagacacgggctcaaggaacccaagagagtggaagaactgcaaaacaagattgtaaattgtctcaaagaccacgtgactttcaacaatggggggttgaaccgccccaattatttgtccaaactgttggggaagctcccagaacttcgtaccctttgcacacaggggctacagcgcattttctacctgaaattggaagacttggtgccaccgccagcaataattgacaaacttttcctggacactttacctttctaagacctcctcccaagcacttcaaaggaactggaatgataatggaaactgtcaagagggggcaagtcacatgggcagagatagccgtgtgagcagtctcagctcaagctgccccccatttctgtaaccctcctagcccccttgatccctaaagaaaacaaacaaacaaacaaaaactgttgctatttcctaacctgcaggcagaacctgaaagggcattttggctccggggcatcctggatttagaacatggactacacacaatacagtggtataaactttttattctcagtttaaaaatcagtttgttgttcagaagaaagattgctataatgtataatgggaaatgtttggccatgcttggttgttgcagttcagacaaatgtaacacacacacacatacacacacacacacacacacagagacacatcttaaggggacccacaagtattgccctttaacaagacttcaaagttttctgctgtaaagaaagctgtaatatatagtaaaactaaatgttgcgtgggtggcatgagttgaagaaggcaaaggcttgtaaatttacccaatgcagtttggctttttaaattattttgtgcctatttatgaataaatattacaaattctaaaagataagtgtgtttgcaaaaaaaaagaaaataaatacataaaaaagggacaagcatgttgattctaggttgaaaatgttataggcacttgctacttcagtaatgtctatattatataaatagtatttcagacactatgtagtctgttagattttataaagattggtagttatctgagcttaaacattttctcaattgtaaaataggtgggcacaagtattacacatcagaaaatcctgacaaaagggacacatagtgtttgtaacaccgtccaacattccttgtttgtaagtgttgtatgtaccgttgatgttgataaaaagaaagtttatatcttgattattttgttgtctaaagctaaacaaaacttgcatgcagcagcttttgactgtttccagagtgcttataatatacataactccctggaaataactgagcactttgaattttttttatgtctaaaattgtcagttaatttattattttgtttgagtaagaattttaatattgccatattctgtagtatttttctttgtatatttctagtatggcacatgatatgagtcactgcctttttttctatggtgtatgacagttagagatgctgattttttttctgataaattctttctttgagaaagacaattttaatgtttacaacaataaaccatgtaaatgaaaaaaaaaa

SEQ ID NO: 116 - protein, 598 aa, Homo sapiens
MPCVQAQYGSSPQGASPASQSYSYHSSGEYSSDFLTPEFVKFSMDLTNTEITATTSLPSFSTFMDNYSTGYDVKPPCLYQMPLSGQQSSIKVEDIQMHNYQQHSHLPPQSEEMMPHSGSVYYKPSSPPTPTTPGFQVQHSPMWDDPGSLHNFHQNYVATTHMIEQRKTPVSRLSLFSFKQSPPGTPVSSCQMRFDGPLHVPMNPEPAGSHHVVDGQTFAVPNPIRKPASMGFPGLQIGHASQLLDTQVPSPPSRGSPSNEGLCAVCGDNAACQHYGVRTCEGCKGFFKRTVQKNAKYVCLANKNCPVDKRRRNRCQYCRFQKCLAVGMVKEVVRTDSLKGRRGRLPSKPKSPQEPSPPSPPVSLISALVRAHVDSNPAMTSLDYSRFQANPDYQMSGDDTQHIQQFYDLLTGSMEIIRGWAEKIPGFADLPKADQDLLFESAFLELFVLRLAYRSNPVEGKLIFCNGVVLHRLQCVRGFGEWIDSIVEFSSNLQNMNIDISAFSCIAALAMVTERHGLKEPKRVEELQNKIVNCLKDHVTFNNGGLNRPNYLSKLLGKLPELRTLCTQGLQRIFYLKLEDLVPPPAIIDKLFLDTLPF

SEQ ID NO: 117 - DNA, 3393 bp, Homo sapiens
  CDS (336)...(2078): Nurr1 (NR4A2) variant 2
ggccagtccgcccggcggctcgcgcacggctccgcggtcccttttgcctgtccagccggccgcctgtccctgctccctccctccgtgaggtgtccgggttcccttcgcccagctctcccacccctacccgaccccggcgcccgggctcccagagggaactgcacttcggcagagttgaatgaatgaagagagacgcggagaactcctaaggaggagattggacaggctggactccccattgcttttctaaaaatcttggaaactttgtccttcattgaattacgacactgtccacctttaatttcctcgaaaacgcctgtaactcggctgaagccatgccttgtgttcaggcgcagtatgggtcctcgcctcaaggagccagccccgcttctcagagctacagttaccactcttcgggagaatacagctccgatttcttaactccagagtttgtcaagtttagcatggacctcaccaacactgaaatcactgccaccacttctctccccagcttcagtacctttatggacaactacagcacaggctacgacgtcaagccaccttgcttgtaccaaatgcccctgtccggacagcagtcctccattaaggtagaagacattcagatgcacaactaccagcaacacagccacctgcccccccagtctgaggagatgatgccgcactccgggtcggtttactacaagccctcctcgcccccgacgcccaccaccccgggcttccaggtgcagcacagccccatgtgggacgacccgggatctctccacaacttccaccagaactacgtggccactacgcacatgatcgagcagaggaaaacgccagtctcccgcctctccctcttctcctttaagcaatcgccccctggcaccccggtgtctagttgccagatgcgcttcgacgggcccctgcacgtccccatgaacccggagcccgccggcagccaccacgtggtggacgggcagaccttcgctgtgcccaaccccattcgcaagcccgcgtccatgggcttcccgggcctgcagatcggccacgcgtctcagctgctcgacacgcaggtgccctcaccgccgtcgcggggctccccctccaacgaggggctgtgcgctgtgtgtggggacaacgcggcctgccaacactacggcgtgcgcacctgtgagggctgcaaaggcttctttaagcgcacagtgcaaaaaaatgcaaaatacgtgtgtttagcaaataaaaactgcccagtggacaagcgtcgccggaatcgctgtcagtactgccgatttcagaagtgcctggctgttgggatggtcaaagaagtggttcgcacagacagtttaaaaggccggagaggtcgtttgccctcgaaaccgaagagcccacaggagccctctcccccttcgcccccggtgagtctgatcagtgccctcgtcagggcccatgtcgactccaacccggctatgaccagcctggactattccaggttccaggcgaaccctgactatcaaatgagtggagatgacacccagcatatccagcaattctatgatctcctgactggctccatggagatcatccggggctgggcagagaagatccctggcttcgcagacctgcccaaagccgaccaagacctgctttttgaatcagctttcttagaactgtttgtccttcgattagcatacaggttgcaatgcgttcgtggctttggggaatggattgattccattgttgaattctcctccaacttgcagaatatgaacatcgacatttctgccttctcctgcattgctgccctggctatggtcacagagagacacgggctcaaggaacccaagagagtggaagaactgcaaaacaagattgtaaattgtctcaaagaccacgtgactttcaacaatggggggttgaaccgccccaattatttgtccaaactgttggggaagctcccagaacttcgtaccctttgcacacaggggctacagcgcattttctacctgaaattggaagacttggtgccaccgccagcaataattgacaaacttttcctggacactttacctttctaagacctcctcccaagcacttcaaaggaactggaatgataatggaaactgtcaagagggggcaagtcacatgggcagagatagccgtgtgagcagtctcagctcaagctgccccccatttctgtaaccctcctagcccccttgatccctaaagaaaacaaacaaacaaacaaaaactgttgctatttcctaacctgcaggcagaacctgaaagggcattttggctccggggcatcctggatttagaacatggactacacacaatacagtggtataaactttttattctcagtttaaaaatcagtttgttgttcagaagaaagattgctataatgtataatgggaaatgtttggccatgcttggttgttgcagttcagacaaatgtaacacacacacacatacacacacacacacacacacagagacacatcttaaggggacccacaagtattgccctttaacaagacttcaaagttttctgctgtaaagaaagctgtaatatatagtaaaactaaatgttgcgtgggtggcatgagttgaagaaggcaaaggcttgtaaatttacccaatgcagtttggctttttaaattattttgtgcctatttatgaataaatattacaaattctaaaagataagtgtgtttgcaaaaaaaaagaaaataaatacataaaaaagggacaagcatgttgattctaggttgaaaatgttataggcacttgctacttcagtaatgtctatattatataaatagtatttcagacactatgtagtctgttagattttataaagattggtagttatctgagcttaaacattttctcaattgtaaaataggtgggcacaagtattacacatcagaaaatcctgacaaaagggacacatagtgtttgtaacaccgtccaacattccttgtttgtaagtgttgtatgtaccgttgatgttgataaaaagaaagtttatatcttgattattttgttgtctaaagctaaacaaaacttgcatgcagcagcttttgactgtttccagagtgcttataatatacataactccctggaaataactgagcactttgaattttttttatgtctaaaattgtcagttaatttattattttgtttgagtaagaattttaatattgccatattctgtagtatttttctttgtatatttctagtatggcacatgatatgagtcactgcctttttttctatggtgtatgacagttagagatgctgattttttttctgataaattctttctttgagaaagacaattttaatgtttacaacaataaaccatgtaaatgaaaaaaaaaa

SEQ ID NO: 118 - protein, 580 aa, Homo sapiens
MPCVQAQYGSSPQGASPASQSYSYHSSGEYSSDFLTPEFVKFSMDLTNTEITATTSLPSFSTFMDNYSTGYDVKPPCLYQMPLSGQQSSIKVEDIQMHNYQQHSHLPPQSEEMMPHSGSVYYKPSSPPTPTTPGFQVQHSPMWDDPGSLHNFHQNYVATTHMIEQRKTPVSRLSLFSFKQSPPGTPVSSCQMRFDGPLHVPMNPEPAGSHHVVDGQTFAVPNPIRKPASMGFPGLQIGHASQLLDTQVPSPPSRGSPSNEGLCAVCGDNAACQHYGVRTCEGCKGFFKRTVQKNAKYVCLANKNCPVDKRRRNRCQYCRFQKCLAVGMVKEVVRTDSLKGRRGRLPSKPKSPQEPSPPSPPVSLISALVRAHVDSNPAMTSLDYSRFQANPDYQMSGDDTQHIQQFYDLLTGSMEIIRGWAEKIPGFADLPKADQDLLFESAFLELFVLRLAYRLQCVRGFGEWIDSIVEFSSNLQNMNIDISAFSCIAALAMVTERHGLKEPKRVEELQNKIVNCLKDHVTFNNGGLNRPNYLSKLLGKLPELRTLCTQGLQRIFYLKLEDLVPPPAIIDKLFLDTLPF

SEQ ID NO: 119 - DNA, 3326 bp, Homo sapiens
  CDS (336)...(1703): Nurr1 (NR4A2) variant 3
ggccagtccgcccggcggctcgcgcacggctccgcggtcccttttgcctgtccagccggccgcctgtccctgctccctccctccgtgaggtgtccgggttcccttcgcccagctctcccacccctacccgaccccggcgcccgggctcccagagggaactgcacttcggcagagttgaatgaatgaagagagacgcggagaactcctaaggaggagattggacaggctggactccccattgcttttctaaaaatcttggaaactttgtccttcattgaattacgacactgtccacctttaatttcctcgaaaacgcctgtaactcggctgaagccatgccttgtgttcaggcgcagtatgggtcctcgcctcaaggagccagccccgcttctcagagctacagttaccactcttcgggagaatacagctccgatttcttaactccagagtttgtcaagtttagcatggacctcaccaacactgaaatcactgccaccacttctctccccagcttcagtacctttatggacaactacagcacaggctacgacgtcaagccaccttgcttgtaccaaatgcccctgtccggacagcagtcctccattaaggtagaagacattcagatgcacaactaccagcaacacagccacctgcccccccagtctgaggagatgatgccgcactccgggtcggtttactacaagccctcctcgcccccgacgcccaccaccccgggcttccaggtgcagcacagccccatgtgggacgacccgggatctctccacaacttccaccagaactacgtggccactacgcacatgatcgagcagaggaaaacgccagtctcccgcctctccctcttctcctttaagcaatcgccccctggcaccccggtgtctagttgccagatgcgcttcgacgggcccctgcacgtccccatgaacccggagcccgccggcagccaccacgtggtggacgggcagaccttcgctgtgcccaaccccattcgcaagcccgcgtccatgggcttcccgggcctgcagatcggccacgcgtctcagctgctcgacacgcaggtgccctcaccgccgtcgcggggctccccctccaacgaggggctgtgcgctgtgtgtggggacaacgcggcctgccaacactacggcgtgcgcacctgtgagggctgcaaaggcttctttaagcgcacagtgcaaaaaaatgcaaaatacgtgtgtttagcaaataaaaactgcccagtggacaagcgtcgccggaatcgctgtcagtactgccgatttcagaagtgcctggctgttgggatggtcaaagaagtggttcgcacagacagtttaaaaggccggagaggtcgtttgccctcgaaaccgaagagcccacaggagccctctcccccttcgcccccggtgagtctgatcagtgccctcgtcagggcccatgtcgactccaacccggctatgaccagcctggactattccaggttccaggcgaaccctgactatcaaatgagtggagatgacacccagcatatccagcaattctatgatctcctgactggctccatggagatcatccggggctgggcagagaagatccctggcttcgcagacctgcccaaagccgaccaagacctgctttttgaatcagctttcttagaactgtttgtccttcgattagcatacagaatatgaacatcgacatttctgccttctcctgcattgctgccctggctatggtcacagagagacacgggctcaaggaacccaagagagtggaagaactgcaaaacaagattgtaaattgtctcaaagaccacgtgactttcaacaatggggggttgaaccgccccaattatttgtccaaactgttggggaagctcccagaacttcgtaccctttgcacacaggggctacagcgcattttctacctgaaattggaagacttggtgccaccgccagcaataattgacaaacttttcctggacactttacctttctaagacctcctcccaagcacttcaaaggaactggaatgataatggaaactgtcaagagggggcaagtcacatgggcagagatagccgtgtgagcagtctcagctcaagctgccccccatttctgtaaccctcctagcccccttgatccctaaagaaaacaaacaaacaaacaaaaactgttgctatttcctaacctgcaggcagaacctgaaagggcattttggctccggggcatcctggatttagaacatggactacacacaatacagtggtataaactttttattctcagtttaaaaatcagtttgttgttcagaagaaagattgctataatgtataatgggaaatgtttggccatgcttggttgttgcagttcagacaaatgtaacacacacacacatacacacacacacacacacacagagacacatcttaaggggacccacaagtattgccctttaacaagacttcaaagttttctgctgtaaagaaagctgtaatatatagtaaaactaaatgttgcgtgggtggcatgagttgaagaaggcaaaggcttgtaaatttacccaatgcagtttggctttttaaattattttgtgcctatttatgaataaatattacaaattctaaaagataagtgtgtttgcaaaaaaaaagaaaataaatacataaaaaagggacaagcatgttgattctaggttgaaaatgttataggcacttgctacttcagtaatgtctatattatataaatagtatttcagacactatgtagtctgttagattttataaagattggtagttatctgagcttaaacattttctcaattgtaaaataggtgggcacaagtattacacatcagaaaatcctgacaaaagggacacatagtgtttgtaacaccgtccaacattccttgtttgtaagtgttgtatgtaccgttgatgttgataaaaagaaagtttatatcttgattattttgttgtctaaagctaaacaaaacttgcatgcagcagcttttgactgtttccagagtgcttataatatacataactccctggaaataactgagcactttgaattttttttatgtctaaaattgtcagttaatttattattttgtttgagtaagaattttaatattgccatattctgtagtatttttctttgtatatttctagtatggcacatgatatgagtcactgcctttttttctatggtgtatgacagttagagatgctgattttttttctgataaattctttctttgagaaagacaattttaatgtttacaacaataaaccatgtaaatgaaaaaaaaaa

SEQ ID NO: 120 - protein, 455 aa, Homo sapiens
MPCVQAQYGSSPQGASPASQSYSYHSSGEYSSDFLTPEFVKFSMDLTNTEITATTSLPSFSTFMDNYSTGYDVKPPCLYQMPLSGQQSSIKVEDIQMHNYQQHSHLPPQSEEMMPHSGSVYYKPSSPPTPTTPGFQVQHSPMWDDPGSLHNFHQNYVATTHMIEQRKTPVSRLSLFSFKQSPPGTPVSSCQMRFDGPLHVPMNPEPAGSHHVVDGQTFAVPNPIRKPASMGFPGLQIGHASQLLDTQVPSPPSRGSPSNEGLCAVCGDNAACQHYGVRTCEGCKGFFKRTVQKNAKYVCLANKNCPVDKRRRNRCQYCRFQKCLAVGMVKEVVRTDSLKGRRGRLPSKPKSPQEPSPPSPPVSLISALVRAHVDSNPAMTSLDYSRFQANPDYQMSGDDTQHIQQFYDLLTGSMEIIRGWAEKIPGFADLPKADQDLLFESAFLELFVLRLAYRI

SEQ ID NO: 121 - DNA, 3269 bp, Homo sapiens
  CDS (347)...(1954): Nurr1 (NR4A2) variant 4
ggccagtccgcccggcggctcgcgcacggctccgcggtcccttttgcctgtccagccggccgcctgtccctgctccctccctccgtgaggtgtccgggttcccttcgcccagctctcccacccctacccgaccccggcgcccgggctcccagagggaactgcacttcggcagagttgaatgaatgaagacagacgcggagaactcctaaggaggagattggacaggctggactccccattgcttttctaaaaatcttggaaactttgtccttcattgaattacgacactgtccacctttaatttcctcgaaaacgcctgtaactcggctgaagcttcagtacctttatggacaactacagcacaggctacgacgtcaagccaccttgcttgtaccaaatgcccctgtccggacagcagtcctccattaaggtagaagacattcagatgcacaactaccagcaacacagccacctgcccccccagtctgaggagatgatgccgcactccgggtcggtttactacaagccctcctcgcccccgacgcccaccaccccgggcttccaggtgcagcacagccccatgtgggacgacccgggatctctccacaacttccaccagaactacgtggccactacgcacatgatcgagcagaggaaaacgccagtctcccgcctctccctcttctcctttaagcaatcgccccctggcaccccggtgtctagttgccagatgcgcttcgacgggcccctgcacgtccccatgaacccggagcccgccggcagccaccacgtggtggacgggcagaccttcgctgtgcccaaccccattcgcaagcccgcgtccatgggcttcccgggcctgcagatcggccacgcgtctcagctgctcgacacgcaggtgccctcaccgccgtcgcggggctccccctccaacgaggggctgtgcgctgtgtgtggggacaacgcggcctgccaacactacggcgtgcgcacctgtgagggctgcaaaggcttctttaagcgcacagtgcaaaaaaatgcaaaatacgtgtgtttagcaaataaaaactgcccagtggacaagcgtcgccggaatcgctgtcagtactgccgatttcagaagtgcctggctgttgggatggtcaaagaagtggttcgcacagacagtttaaaaggccggagaggtcgtttgccctcgaaaccgaagagcccacaggagccctctcccccttcgcccccggtgagtctgatcagtgccctcgtcagggcccatgtcgactccaacccggctatgaccagcctggactattccaggttccaggcgaaccctgactatcaaatgagtggagatgacacccagcatatccagcaattctatgatctcctgactggctccatggagatcatccggggctgggcagagaagatccctggcttcgcagacctgcccaaagccgaccaagacctgctttttgaatcagctttcttagaactgtttgtccttcgattagcatacaggtccaacccagtggagggtaaactcatcttttgcaatggggtggtcttgcacaggttgcaatgcgttcgtggctttggggaatggattgattccattgttgaattctcctccaacttgcagaatatgaacatcgacatttctgccttctcctgcattgctgccctggctatggtcacagagagacacgggctcaaggaacccaagagagtggaagaactgcaaaacaagattgtaaattgtctcaaagaccacgtgactttcaacaatggggggttgaaccgccccaattatttgtccaaactgttggggaagctcccagaacttcgtaccctttgcacacaggggctacagcgcattttctacctgaaattggaagacttggtgccaccgccagcaataattgacaaacttttcctggacactttacctttctaagacctcctcccaagcacttcaaaggaactggaatgataatggaaactgtcaagagggggcaagtcacatgggcagagatagccgtgtgagcagtctcagctcaagctgccccccatttctgtaaccctcctagcccccttgatccctaaagaaaacaaacaaacaaacaaaaactgttgctatttcctaacctgcaggcagaacctgaaagggcattttggctccggggcatcctggatttagaacatggactacacacaatacagtggtataaactttttattctcagtttaaaaatcagtttgttgttcagaagaaagattgctataatgtataatgggaaatgtttggccatgcttggttgttgcagttcagacaaatgtaacacacacacacatacacacacacacacacacacagagacacatcttaaggggacccacaagtattgccctttaacaagacttcaaagttttctgctgtaaagaaagctgtaatatatagtaaaactaaatgttgcgtgggtggcatgagttgaagaaggcaaaggcttgtaaatttacccaatgcagtttggctttttaaattattttgtgcctatttatgaataaatattacaaattctaaaagataagtgtgtttgcaaaaaaaaagaaaataaatacataaaaaagggacaagcatgttgattctaggttgaaaatgttataggcacttgctacttcagtaatgtctatattatataaatagtatttcagacactatgtagtctgttagattttataaagattggtagttatctgagcttaaacattttctcaattgtaaaataggtgggcacaagtattacacatcagaaaatcctgacaaaagggacacatagtgtttgtaacaccgtccaacattccttgtttgtaagtgttgtatgtaccgttgatgttgataaaaagaaagtttatatcttgattattttgttgtctaaagctaaacaaaacttgcatgcagcagcttttgactgtttccagagtgcttataatatacataactccctggaaataactgagcactttgaattttttttatgtctaaaattgtcagttaatttattattttgtttgagtaagaattttaatattgccatattctgtagtatttttctttgtatatttctagtatggcacatgatatgagtcactgcctttttttctatggtgtatgacagttagagatgctgattttttttctgataaattctttctttgagaaagacaattttaatgtttacaacaataaaccatgtaaatgaaaaaaaaaa

SEQ ID NO: 122 - protein, 535 aa, Homo sapiens
MDNYSTGYDVKPPCLYQMPLSGQQSSIKVEDIQMHNYQQHSHLPPQSEEMMPHSGSVYYKPSSPPTPTTPGFQVQHSPMWDDPGSLHNFHQNYVATTHMIEQRKTPVSRLSLFSFKQSPPGTPVSSCQMRFDGPLHVPMNPEPAGSHHVVDGQTFAVPNPIRKPASMGFPGLQIGHASQLLDTQVPSPPSRGSPSNEGLCAVCGDNAACQHYGVRTCEGCKGFFKRTVQKNAKYVCLANKNCPVDKRRRNRCQYCRFQKCLAVGMVKEVVRTDSLKGRRGRLPSKPKSPQEPSPPSPPVSLISALVRAHVDSNPAMTSLDYSRFQANPDYQMSGDDTQHIQQFYDLLTGSMEIIRGWAEKIPGFADLPKADQDLLFESAFLELFVLRLAYRSNPVEGKLIFCNGVVLHRLQCVRGFGEWIDSIVEFSSNLQNMNIDISAFSCIAALAMVTERHGLKEPKRVEELQNKIVNCLKDHVTFNNGGLNRPNYLSKLLGKLPELRTLCTQGLQRIFYLKLEDLVPPPAIIDKLFLDTLPF

SEQ ID NO: 123 - DNA, 5635 bp, Homo sapiens
  CDS (730)...(2610): Nor1 (NR4A3) variant 1
ataaatgacgtgccgagagagcgagcgaacgcgcagccgggagagcggagtctcctgcctcccgccccccacccctccagctcctgctcctcctccgctccccatacacagacgcgctcacacccgctccctcactcgcacacacagacacaagcgcgcacacaggctccgcacacacacttcgctctcccgcgcgctcacacccctcttgccctgagcccttgccggtgcagcgcggcgccgcagctggacgcccctcccgggctcactttgcaacgctgacggtgccggcagtggccgtggaggtgggaacagcggcggcatcctcccccctggtcacagcccaagccaggacgcccgcggaacctctcggctgtgctctcccatgagtcgggatcgcagcatcccccaccagccgctcaccgcctccgggagccgctgggcttgtacaccgcagcccttccgggacagcagctgtgactcccccccagtgcagatttcgggacagctctctagaaactcgctctaaagacggaaccgccacagcactcaaagcccactgcggaagagggcagcccggcaagcccgggccctgagcctggacccttagcggtgccgggcagcactgccggcgcttcgcctcgccggacgtccgctcctcctacactctcagcctccgctggagagacccccagccccaccattcagcgcgcaagataccctgcagatatgccctgcgtccaagcccaatatagcccttcccctccaggttccagttatgcggcgcagacatacagctcggaatacaccacggagatcatgaaccccgactacaccaagctgaccatggaccttggcagcactgagatcacggctacagccaccacgtccctgcccagcatcagtaccttcgtggagggctactcgagcaactacgaactcaagccttcctgcgtgtaccaaatgcagcggcccttgatcaaagtggaggaggggcgggcgcccagctaccatcaccatcaccaccaccaccaccaccaccaccaccatcaccagcagcagcatcagcagccatccattcctccagcctccagcccggaggacgaggtgctgcccagcacctccatgtacttcaagcagtccccaccgtccacccccaccacgccggccttccccccgcaggcgggggcgttatgggacgaggcactgccctcggcgcccggctgcatcgcacccggcccgctgctggacccgccgatgaaggcggtccccacggtggccggcgcgcgcttcccgctcttccacttcaagccctcgccgccgcatccccccgcgcccagcccggccggcggccaccacctcggctacgacccgacggccgctgccgcgctcagcctgccgctgggagccgcagccgccgcgggcagccaggccgccgcgcttgagagccacccgtacgggctgccgctggccaagagggcggccccgctggccttcccgcctctcggcctcacgccctcccctaccgcgtccagcctgctgggcgagagtcccagcctgccgtcgccgcccagcaggagctcgtcgtctggcgagggcacgtgtgccgtgtgcggggacaacgccgcctgccagcactacggcgtgcgaacctgcgagggctgcaagggctttttcaagagaacagtgcagaaaaatgcaaaatatgtttgcctggcaaataaaaactgcccagtagacaagagacgtcgaaaccgatgtcagtactgtcgatttcagaagtgtctcagtgttggaatggtaaaagaagttgtccgtacagatagtctgaaagggaggagaggtcgtctgccttccaaaccaaagagcccattacaacaggaaccttctcagccctctccaccttctcctccaatctgcatgatgaatgcccttgtccgagctttaacagactcaacacccagagatcttgattattccagatactgtcccactgaccaggctgctgcaggcacagatgctgagcatgtgcaacaattctacaacctcctgacagcctccattgatgtatccagaagctgggcagaaaagattccgggatttactgatctccccaaagaagatcagacattacttattgaatcagcctttttggagctgtttgtcctcagactttccatcaggtcaaacactgctgaagataagtttgtgttctgcaatggacttgtcctgcatcgacttcagtgccttcgtggatttggggagtggctcgactctattaaagacttttccttaaatttgcagagcctgaaccttgatatccaagccttagcctgcctgtcagcactgagcatgatcacagaaagacatgggttaaaagaaccaaagagagtcgaagagctatgcaacaagatcacaagcagtttaaaagaccaccagagtaagggacaggctctggagcccaccgagtccaaggtcctgggtgccctggtagaactgaggaagatctgcaccctgggcctccagcgcatcttctacctgaagctggaagacttggtgtctccaccttccatcattgacaagctcttcctggacaccctacctttctaatcaggagcagtggagcagtgagctgcctcctctcctagcacctgcttgctacgcagcaaagggataggtttggaaacctatcatttcctgtccttccttaagaggaaaagcagctcctgtagaaagcaaagactttcttttttttctggctcttttccttacaacctaaagccagaaaacttgcagagtattgtgttggggttgtgttttatatttaggcattgggggatggggtgggagggggttatagttcatgagggttttctaagaaattgctaacaaagcacttttggacaatgctatcccagcaggaaaaaaaaggataatataactgttttaaaactctttctggggaatccaattatagttgctttgtatttaaaaacaagaacagccaagggttgttcgccagggtaggatgtgtcttaaagattggtcccttgaaaatatgcttcctgtatcaaaggtacgtatgtggtgcaaacaaggcagaaacttccttttaatttccttcttcctttattttaacaaatggtgaaagatggaggattacctacaaatcagacatggcaaaacaataatggctgtttgcttccataaacaagtgcaattttttaaagtgctgtcttactaagtcttgtttattaactctcctttattctatatggaaataaaaaggaggcagtcatgttagcaaatgacacgttaatatccctagcagaggctgtgttcaccttccctgtcgatcccttctgaggtatggcccatccaagacttttaggccattcttgatggaaccagatccctgccctgactgtccagctatcctgaaagtggatcagattataaactggattacatgtaactgttttggttgtgttctatcaaccccaccagagttccctaaacttgcttcagttatagtaactgactggtatattcattcagaagcgccataagtcagttgagtatttgatccctagataagaacatgcaaatcagcaggaactggtcatacagggtaagcaccagggacaataaggatttttatagatataatttaatttttgttattggttaaggagacaattttggagagcaagcaaatctttttaaaaaatagtatgaatgtgaatactagaaaagatttaaaaaatagtatgagtgtgagtactaggaaggattagtgggctgcgtttcaacattccgtgttcgtactcccttttgtatgtttctactgttaatgccatattactatgagataatttgttgcatagtgtccttatttgtataaacatttgtatgcacgttatattgtaatagctttgcctgtatttattgcaagaccaccagctcctggaagctgagttacagagtaattaaatggggtgttcacagtgacttggatacaccaattagaaattaaataagcaaatatatatatatatataaatatagcaggttacatatatatatttataatgtgtctttttattaaccatttgtacaataaatgtcacttcccatgccgttattttatggttcatttgcagtgacttttaaggcagtactgtttagcactttgatattaaaattttgcttatgttttgctaaattcgaataatgtttgaagatttttaggtctaaaagtctttatattatatactctgtatcaagtcaaaatatctttggccattttgctaagaaacaaactttgaatgtcaaactgatgtcacagtagtttttgttagctttaaatcatttttgctttagtctttttaaaggaaaataacaaaactatgctgtttatattgtcattaaattatacaatcaaacaaatgccaaatgaattgcctaattgctgcaaagtataacccagataggaaatcatatgtttttttccaagagtcattctaatatttgattatgttatgtgtgcttttatgaaagattgttatttttatatatcaagatgatagaacctggaatgttaggattttgaaatgttagacttggaaggggcctggtctgtcaactagtccaaccccttaaaattcatagaggagcaaactggggcccattgaagggtgaagagttactcaaggtcaaacagctggtaacagaatcaagactaagacctaatttacctttccatactctttttttttctcaacttcatctatataaaatcaggcttttaaacataaccactaatatttacctgaagataaccatgagtaaagtatacttttgcattaattttttgagcttatatgcaaacataataaatattattaaatatcaggaaagctaacatttcatacaagatagcttcagaccaaattcaaattgaatttgaataaattagaaatactgtgcatacataaccttcttgtgcaccatgagtatttggaaagttaatccttgtttttgtcgtgtctataaaggaagaacaaaacaaaataaaaacagagccctagagaaatgctgttactttttatttttacacccatcagatttaaggaaaagactttttagccattataatctagtggttggaaggaatgaagaagcttttttagtaataggtccagatatgagtgctaaaaataaagatgatagcatgttcttctgtcttccatagttattacaactatgagagcctcccaagtcatcttatcaactcaactcccttttttttgtcttaatgttgcacataagtttatacagagtggatgaccacactagcacagaagagaacaacatgtattaaagcaggtgattcctccccttggcgggagagctctctcagtgtgaacatgccttctgtgggcggaaatcaggaagccaccagctgttaatggagagtgccttgcttttatttcagacagcagagttttccaaagtttctctgctcctctaacagcattgctctttagtgtgtgttaacctgtggtttgaaagaaatgctcttgtacattaacaatgtaaatttaaatgattaaattacattttatcaatggca

SEQ ID NO: 124 - protein, 626 aa, Homo sapiens
MPCVQAQYSPSPPGSSYAAQTYSSEYTTEIMNPDYTKLTMDLGSTEITATATTSLPSISTFVEGYSSNYELKPSCVYQMQRPLIKVEEGRAPSYHHHHHHHHHHHHHHQQQHQQPSIPPASSPEDEVLPSTSMYFKQSPPSTPTTPAFPPQAGALWDEALPSAPGCIAPGPLLDPPMKAVPTVAGARFPLFHFKPSPPHPPAPSPAGGHHLGYDPTAAAALSLPLGAAAAAGSQAAALESHPYGLPLAKRAAPLAFPPLGLTPSPTASSLLGESPSLPSPPSRSSSSGEGTCAVCGDNAACQHYGVRTCEGCKGFFKRTVQKNAKYVCLANKNCPVDKRRRNRCQYCRFQKCLSVGMVKEVVRTDSLKGRRGRLPSKPKSPLQQEPSQPSPPSPPICMMNALVRALTDSTPRDLDYSRYCPTDQAAAGTDAEHVQQFYNLLTASIDVSRSWAEKIPGFTDLPKEDQTLLIESAFLELFVLRLSIRSNTAEDKFVFCNGLVLHRLQCLRGFGEWLDSIKDFSLNLQSLNLDIQALACLSALSMITERHGLKEPKRVEELCNKITSSLKDHQSKGQALEPTESKVLGALVELRKICTLGLQRIFYLKLEDLVSPPSIIDKLFLDTLPF

SEQ ID NO: 125 - DNA, 6382 bp, Homo sapiens
  CDS (1477)...(3357): Nor1 (NR4A3) variant 2
ataaatgacgtgccgagagagcgagcgaacgcgcagccgggagagcggagtctcctgcctcccgccccccacccctccagctcctgctcctcctccgctccccatacacagacgcgctcacacccgctccctcactcgcacacacagacacaagcgcgcacacaggctccgcacacacacttcgctctcccgcgcgctcacacccctcttgccctgagcccttgccggtgcagcgcggcgccgcagctggacgcccctcccgggctcactttgcaacgctgacggtgccggcagtggccgtggaggtgggaacagcggcggcatcctcccccctggtcacagcccaagccaggacgcccgcggaacctctcggctgtgctctcccatgagtcgggatcgcagcatcccccaccagccgctcaccgcctccgggagccgctgggcttgtacaccgcagcccttccgggacagcagctgtgactcccccccagtgcagatttcgggacagctctctagaaactcgctctaaagacggaaccgccacagcactcaaagcccactgcggaagagggcagcccggcaagcccgggccctgagcctggacccttagcggtgccgggcagcactgccggcgcttcgcctcgccggacgtccgctcctcctacactctcagcctccgctggagagacccccagccccaccattcagcgcgcaagatagtgtgtatatatatatatatgggtgggtgttttgttgcagctgctgatctttttctttgcagatggtacaaactctcccgagtcaatttcctgggcctatgtccccacctagctgactgaagttatcaacaggggtccagtttgtgcaggctgctagccctattggaagagtggggatgaggtgggagaaagcaaccacaacgtgtgtgggcaacctcaattggcactcataaaatgttagaatgtcaactctctcccttggccactaaatctctcacagggtagtttttcttgcctaactcaggtttacaaatcaatgtgtatgccttgggggaccaatggcctctttcctcccaaataaaccactggctttctctttgtccccctaggttatagctgaggagcccactccaattagtttataggattcaaagcctctttttaaaaacatctctgagcttatgaggaaagacttcaagtttcccaaatctagtggaggacagggcaagggaggaaagataggtacaggagtccacaggaggccaggttttggcacccctttgtcaggaattcagcttccttactagggatgaagaaaataagtgtggggctttgtgtctatgctaccagaaggaggagaggatgacacttcctctctgtttcccagattagagaacagtgaacccaatgctgcctgttggctagaaaacaagtgttaacttgcttctgagagacccttttctctgtccctgcagatatgccctgcgtccaagcccaatatagcccttcccctccaggttccagttatgcggcgcagacatacagctcggaatacaccacggagatcatgaaccccgactacaccaagctgaccatggaccttggcagcactgagatcacggctacagccaccacgtccctgcccagcatcagtaccttcgtggagggctactcgagcaactacgaactcaagccttcctgcgtgtaccaaatgcagcggcccttgatcaaagtggaggaggggcgggcgcccagctaccatcaccatcaccaccaccaccaccaccaccaccaccatcaccagcagcagcatcagcagccatccattcctccagcctccagcccggaggacgaggtgctgcccagcacctccatgtacttcaagcagtccccaccgtccacccccaccacgccggccttccccccgcaggcgggggcgttatgggacgaggcactgccctcggcgcccggctgcatcgcacccggcccgctgctggacccgccgatgaaggcggtccccacggtggccggcgcgcgcttcccgctcttccacttcaagccctcgccgccgcatccccccgcgcccagcccggccggcggccaccacctcggctacgacccgacggccgctgccgcgctcagcctgccgctgggagccgcagccgccgcgggcagccaggccgccgcgcttgagagccacccgtacgggctgccgctggccaagagggcggccccgctggccttcccgcctctcggcctcacgccctcccctaccgcgtccagcctgctgggcgagagtcccagcctgccgtcgccgcccagcaggagctcgtcgtctggcgagggcacgtgtgccgtgtgcggggacaacgccgcctgccagcactacggcgtgcgaacctgcgagggctgcaagggctttttcaagagaacagtgcagaaaaatgcaaaatatgtttgcctggcaaataaaaactgcccagtagacaagagacgtcgaaaccgatgtcagtactgtcgatttcagaagtgtctcagtgttggaatggtaaaagaagttgtccgtacagatagtctgaaagggaggagaggtcgtctgccttccaaaccaaagagcccattacaacaggaaccttctcagccctctccaccttctcctccaatctgcatgatgaatgcccttgtccgagctttaacagactcaacacccagagatcttgattattccagatactgtcccactgaccaggctgctgcaggcacagatgctgagcatgtgcaacaattctacaacctcctgacagcctccattgatgtatccagaagctgggcagaaaagattccgggatttactgatctccccaaagaagatcagacattacttattgaatcagcctttttggagctgtttgtcctcagactttccatcaggtcaaacactgctgaagataagtttgtgttctgcaatggacttgtcctgcatcgacttcagtgccttcgtggatttggggagtggctcgactctattaaagacttttccttaaatttgcagagcctgaaccttgatatccaagccttagcctgcctgtcagcactgagcatgatcacagaaagacatgggttaaaagaaccaaagagagtcgaagagctatgcaacaagatcacaagcagtttaaaagaccaccagagtaagggacaggctctggagcccaccgagtccaaggtcctgggtgccctggtagaactgaggaagatctgcaccctgggcctccagcgcatcttctacctgaagctggaagacttggtgtctccaccttccatcattgacaagctcttcctggacaccctacctttctaatcaggagcagtggagcagtgagctgcctcctctcctagcacctgcttgctacgcagcaaagggataggtttggaaacctatcatttcctgtccttccttaagaggaaaagcagctcctgtagaaagcaaagactttcttttttttctggctcttttccttacaacctaaagccagaaaacttgcagagtattgtgttggggttgtgttttatatttaggcattgggggatggggtgggagggggttatagttcatgagggttttctaagaaattgctaacaaagcacttttggacaatgctatcccagcaggaaaaaaaaggataatataactgttttaaaactctttctggggaatccaattatagttgctttgtatttaaaaacaagaacagccaagggttgttcgccagggtaggatgtgtcttaaagattggtcccttgaaaatatgcttcctgtatcaaaggtacgtatgtggtgcaaacaaggcagaaacttccttttaatttccttcttcctttattttaacaaatggtgaaagatggaggattacctacaaatcagacatggcaaaacaataatggctgtttgcttccataaacaagtgcaattttttaaagtgctgtcttactaagtcttgtttattaactctcctttattctatatggaaataaaaaggaggcagtcatgttagcaaatgacacgttaatatccctagcagaggctgtgttcaccttccctgtcgatcccttctgaggtatggcccatccaagacttttaggccattcttgatggaaccagatccctgccctgactgtccagctatcctgaaagtggatcagattataaactggattacatgtaactgttttggttgtgttctatcaaccccaccagagttccctaaacttgcttcagttatagtaactgactggtatattcattcagaagcgccataagtcagttgagtatttgatccctagataagaacatgcaaatcagcaggaactggtcatacagggtaagcaccagggacaataaggatttttatagatataatttaatttttgttattggttaaggagacaattttggagagcaagcaaatctttttaaaaaatagtatgaatgtgaatactagaaaagatttaaaaaatagtatgagtgtgagtactaggaaggattagtgggctgcgtttcaacattccgtgttcgtactcccttttgtatgtttctactgttaatgccatattactatgagataatttgttgcatagtgtccttatttgtataaacatttgtatgcacgttatattgtaatagctttgcctgtatttattgcaagaccaccagctcctggaagctgagttacagagtaattaaatggggtgttcacagtgacttggatacaccaattagaaattaaataagcaaatatatatatatatataaatatagcaggttacatatatatatttataatgtgtctttttattaaccatttgtacaataaatgtcacttcccatgccgttattttatggttcatttgcagtgacttttaaggcagtactgtttagcactttgatattaaaattttgcttatgttttgctaaattcgaataatgtttgaagatttttaggtctaaaagtctttatattatatactctgtatcaagtcaaaatatctttggccattttgctaagaaacaaactttgaatgtcaaactgatgtcacagtagtttttgttagctttaaatcatttttgctttagtctttttaaaggaaaataacaaaactatgctgtttatattgtcattaaattatacaatcaaacaaatgccaaatgaattgcctaattgctgcaaagtataacccagataggaaatcatatgtttttttccaagagtcattctaatatttgattatgttatgtgtgcttttatgaaagattgttatttttatatatcaagatgatagaacctggaatgttaggattttgaaatgttagacttggaaggggcctggtctgtcaactagtccaaccccttaaaattcatagaggagcaaactggggcccattgaagggtgaagagttactcaaggtcaaacagctggtaacagaatcaagactaagacctaatttacctttccatactctttttttttctcaacttcatctatataaaatcaggcttttaaacataaccactaatatttacctgaagataaccatgagtaaagtatacttttgcattaattttttgagcttatatgcaaacataataaatattattaaatatcaggaaagctaacatttcatacaagatagcttcagaccaaattcaaattgaatttgaataaattagaaatactgtgcatacataaccttcttgtgcaccatgagtatttggaaagttaatccttgtttttgtcgtgtctataaaggaagaacaaaacaaaataaaaacagagccctagagaaatgctgttactttttatttttacacccatcagatttaaggaaaagactttttagccattataatctagtggttggaaggaatgaagaagcttttttagtaataggtccagatatgagtgctaaaaataaagatgatagcatgttcttctgtcttccatagttattacaactatgagagcctcccaagtcatcttatcaactcaactcccttttttttgtcttaatgttgcacataagtttatacagagtggatgaccacactagcacagaagagaacaacatgtattaaagcaggtgattcctccccttggcgggagagctctctcagtgtgaacatgccttctgtgggcggaaatcaggaagccaccagctgttaatggagagtgccttgcttttatttcagacagcagagttttccaaagtttctctgctcctctaacagcattgctctttagtgtgtgttaacctgtggtttgaaagaaatgctcttgtacattaacaatgtaaatttaaatgattaaattacattttatcaatggca

SEQ ID NO: 126 - protein, 626 aa, Homo sapiens; identical to SEQ ID NO: 124

SEQ ID NO: 127 - DNA, 2588 bp, Homo sapiens
  CDS (730)...(2061): Nor1 (NR4A3) variant 3
ataaatgacgtgccgagagagcgagcgaacgcgcagccgggagagcggagtctcctgcctcccgccccccacccctccagctcctgctcctcctccgctccccatacacagacgcgctcacacccgctccctcactcgcacacacagacacaagcgcgcacacaggctccgcacacacacttcgctctcccgcgcgctcacacccctcttgccctgagcccttgccggtgcagcgcggcgccgcagctggacgcccctcccgggctcactttgcaacgctgacggtgccggcagtggccgtggaggtgggaacagcggcggcatcctcccccctggtcacagcccaagccaggacgcccgcggaacctctcggctgtgctctcccatgagtcgggatcgcagcatcccccaccagccgctcaccgcctccgggagccgctgggcttgtacaccgcagcccttccgggacagcagctgtgactcccccccagtgcagatttcgggacagctctctagaaactcgctctaaagacggaaccgccacagcactcaaagcccactgcggaagagggcagcccggcaagcccgggccctgagcctggacccttagcggtgccgggcagcactgccggcgcttcgcctcgccggacgtccgctcctcctacactctcagcctccgctggagagacccccagccccaccattcagcgcgcaagataccctgcagatatgccctgcgtccaagcccaatatagcccttcccctccaggttccagttatgcggcgcagacatacagctcggaatacaccacggagatcatgaaccccgactacaccaagctgaccatggaccttggcagcactgagatcacggctacagccaccacgtccctgcccagcatcagtaccttcgtggagggctactcgagcaactacgaactcaagccttcctgcgtgtaccaaatgcagcggcccttgatcaaagtggaggaggggcgggcgcccagctaccatcaccatcaccaccaccaccaccaccaccaccaccatcaccagcagcagcatcagcagccatccattcctccagcctccagcccggaggacgaggtgctgcccagcacctccatgtacttcaagcagtccccaccgtccacccccaccacgccggccttccccccgcaggcgggggcgttatgggacgaggcactgccctcggcgcccggctgcatcgcacccggcccgctgctggacccgccgatgaaggcggtccccacggtggccggcgcgcgcttcccgctcttccacttcaagccctcgccgccgcatccccccgcgcccagcccggccggcggccaccacctcggctacgacccgacggccgctgccgcgctcagcctgccgctgggagccgcagccgccgcgggcagccaggccgccgcgcttgagagccacccgtacgggctgccgctggccaagagggcggccccgctggccttcccgcctctcggcctcacgccctcccctaccgcgtccagcctgctgggcgagagtcccagcctgccgtcgccgcccagcaggagctcgtcgtctggcgagggcacgtgtgccgtgtgcggggacaacgccgcctgccagcactacggcgtgcgaacctgcgagggctgcaagggctttttcaagagaacagtgcagaaaaatgcaaaatatgtttgcctggcaaataaaaactgcccagtagacaagagacgtcgaaaccgatgtcagtactgtcgatttcagaagtgtctcagtgttggaatggtaaaagaagttgtccgtacagatagtctgaaagggaggagaggtcgtctgccttccaaaccaaagagcccattacaacaggaaccttctcagccctctccaccttctcctccaatctgcatgatgaatgctcttgtccgagctttaacagactcaacacccagagatcttgattattccagagtaagttttatgatttcctgctttcaaatgaatgatcagggtctctatttatggctactagtaataagagttgattgaatgattttgtgtctggcaccatgttagacagttttcatactttttctatatttctcgcttcatttagcaattcagtgcatccattgcagcaaataatttttgccttattgaatctctaaatgccttaacaagtgaccctgacagtgctgcacctgtcatacacattgttgcaggattcctggtggttgtgccaatgaaaatctgcacagacaaactacaatttgtagatttatctcgtgatctagacaaagtgactactgttttttttcatattgtgttcaaaccatctgggtgagcctcaagttattactaagcagtttatccaattgcatcagcattgattgacctgctgcttattcagagggattagaccattggtggagagaagcgagctctggctgtgacatcagttgtcaggagaactgggatggaacgccacctctgctacttcctgcctgtgtcacctggttcctgcttttggctctctcctgcctacagtggaaatggctacaatatttaacctcaga

SEQ ID NO: 128 - protein, 443 aa, Homo sapiens
MPCVQAQYSPSPPGSSYAAQTYSSEYTTEIMNPDYTKLTMDLGSTEITATATTSLPSISTFVEGYSSNYELKPSCVYQMQRPLIKVEEGRAPSYHHHHHHHHHHHHHHQQQHQQPSIPPASSPEDEVLPSTSMYFKQSPPSTPTTPAFPPQAGALWDEALPSAPGCIAPGPLLDPPMKAVPTVAGARFPLFHFKPSPPHPPAPSPAGGHHLGYDPTAAAALSLPLGAAAAAGSQAAALESHPYGLPLAKRAAPLAFPPLGLTPSPTASSLLGESPSLPSPPSRSSSSGEGTCAVCGDNAACQHYGVRTCEGCKGFFKRTVQKNAKYVCLANKNCPVDKRRRNRCQYCRFQKCLSVGMVKEVVRTDSLKGRRGRLPSKPKSPLQQEPSQPSPPSPPICMMNALVRALTDSTPRDLDYSRVSFMISCFQMNDQGLYLWLLVIRVD

SEQ ID NO: 129 - DNA, 4983 bp, Homo sapiens
  CDS (45)...(1958): Nor1 (NR4A3) variant 4
caggccctcatcaccttttttcaagtcaagatttcatcccatacatgcatgactcaatcagatttggaaatgtggatatgccctgcgtccaagcccaatatagcccttcccctccaggttccagttatgcggcgcagacatacagctcggaatacaccacggagatcatgaaccccgactacaccaagctgaccatggaccttggcagcactgagatcacggctacagccaccacgtccctgcccagcatcagtaccttcgtggagggctactcgagcaactacgaactcaagccttcctgcgtgtaccaaatgcagcggcccttgatcaaagtggaggaggggcgggcgcccagctaccatcaccatcaccaccaccaccaccaccaccaccaccatcaccagcagcagcatcagcagccatccattcctccagcctccagcccggaggacgaggtgctgcccagcacctccatgtacttcaagcagtccccaccgtccacccccaccacgccggccttccccccgcaggcgggggcgttatgggacgaggcactgccctcggcgcccggctgcatcgcacccggcccgctgctggacccgccgatgaaggcggtccccacggtggccggcgcgcgcttcccgctcttccacttcaagccctcgccgccgcatccccccgcgcccagcccggccggcggccaccacctcggctacgacccgacggccgctgccgcgctcagcctgccgctgggagccgcagccgccgcgggcagccaggccgccgcgcttgagagccacccgtacgggctgccgctggccaagagggcggccccgctggccttcccgcctctcggcctcacgccctcccctaccgcgtccagcctgctgggcgagagtcccagcctgccgtcgccgcccagcaggagctcgtcgtctggcgagggcacgtgtgccgtgtgcggggacaacgccgcctgccagcactacggcgtgcgaacctgcgagggctgcaagggctttttcaagagaacagtgcagaaaaatgcaaaatatgtttgcctggcaaataaaaactgcccagtagacaagagacgtcgaaaccgatgtcagtactgtcgatttcagaagtgtctcagtgttggaatggtaaaagaagttgtccgtacagatagtctgaaagggaggagaggtcgtctgccttccaaaccaaagagcccattacaacaggaaccttctcagccctctccaccttctcctccaatctgcatgatgaatgcccttgtccgagctttaacagactcaacacccagagatcttgattattccagatactgtcccactgaccaggctgctgcaggcacagatgctgagcatgtgcaacaattctacaacctcctgacagcctccattgatgtatccagaagctgggcagaaaagattccgggatttactgatctccccaaagaagatcagacattacttattgaatcagcctttttggagctgtttgtcctcagactttccatcaggtcaaacactgctgaagataagtttgtgttctgcaatggacttgtcctgcatcgacttcagtgccttcgtggatttggggagtggctcgactctattaaagacttttccttaaatttgcagagcctgaaccttgatatccaagccttagcctgcctgtcagcactgagcatgatcacagaaagacatgggttaaaagaaccaaagagagtcgaagagctatgcaacaagatcacaagcagtttaaaagaccaccagagtaagggacaggctctggagcccaccgagtccaaggtcctgggtgccctggtagaactgaggaagatctgcaccctgggcctccagcgcatcttctacctgaagctggaagacttggtgtctccaccttccatcattgacaagctcttcctggacaccctacctttctaatcaggagcagtggagcagtgagctgcctcctctcctagcacctgcttgctacgcagcaaagggataggtttggaaacctatcatttcctgtccttccttaagaggaaaagcagctcctgtagaaagcaaagactttcttttttttctggctcttttccttacaacctaaagccagaaaacttgcagagtattgtgttggggttgtgttttatatttaggcattgggggatggggtgggagggggttatagttcatgagggttttctaagaaattgctaacaaagcacttttggacaatgctatcccagcaggaaaaaaaaggataatataactgttttaaaactctttctggggaatccaattatagttgctttgtatttaaaaacaagaacagccaagggttgttcgccagggtaggatgtgtcttaaagattggtcccttgaaaatatgcttcctgtatcaaaggtacgtatgtggtgcaaacaaggcagaaacttccttttaatttccttcttcctttattttaacaaatggtgaaagatggaggattacctacaaatcagacatggcaaaacaataatggctgtttgcttccataaacaagtgcaattttttaaagtgctgtcttactaagtcttgtttattaactctcctttattctatatggaaataaaaaggaggcagtcatgttagcaaatgacacgttaatatccctagcagaggctgtgttcaccttccctgtcgatcccttctgaggtatggcccatccaagacttttaggccattcttgatggaaccagatccctgccctgactgtccagctatcctgaaagtggatcagattataaactggattacatgtaactgttttggttgtgttctatcaaccccaccagagttccctaaacttgcttcagttatagtaactgactggtatattcattcagaagcgccataagtcagttgagtatttgatccctagataagaacatgcaaatcagcaggaactggtcatacagggtaagcaccagggacaataaggatttttatagatataatttaatttttgttattggttaaggagacaattttggagagcaagcaaatctttttaaaaaatagtatgaatgtgaatactagaaaagatttaaaaaatagtatgagtgtgagtactaggaaggattagtgggctgcgtttcaacattccgtgttcgtactcccttttgtatgtttctactgttaatgccatattactatgagataatttgttgcatagtgtccttatttgtataaacatttgtatgcacgttatattgtaatagctttgcctgtatttattgcaagaccaccagctcctggaagctgagttacagagtaattaaatggggtgttcacagtgacttggatacaccaattagaaattaaataagcaaatatatatatatatataaatatagcaggttacatatatatatttataatgtgtctttttattaaccatttgtacaataaatgtcacttcccatgccgttattttatggttcatttgcagtgacttttaaggcagtactgtttagcactttgatattaaaattttgcttatgttttgctaaattcgaataatgtttgaagatttttaggtctaaaagtctttatattatatactctgtatcaagtcaaaatatctttggccattttgctaagaaacaaactttgaatgtcaaactgatgtcacagtagtttttgttagctttaaatcatttttgctttagtctttttaaaggaaaataacaaaactatgctgtttatattgtcattaaattatacaatcaaacaaatgccaaatgaattgcctaattgctgcaaagtataacccagataggaaatcatatgtttttttccaagagtcattctaatatttgattatgttatgtgtgcttttatgaaagattgttatttttatatatcaagatgatagaacctggaatgttaggattttgaaatgttagacttggaaggggcctggtctgtcaactagtccaaccccttaaaattcatagaggagcaaactggggcccattgaagggtgaagagttactcaaggtcaaacagctggtaacagaatcaagactaagacctaatttacctttccatactctttttttttctcaacttcatctatataaaatcaggcttttaaacataaccactaatatttacctgaagataaccatgagtaaagtatacttttgcattaattttttgagcttatatgcaaacataataaatattattaaatatcaggaaagctaacatttcatacaagatagcttcagaccaaattcaaattgaatttgaataaattagaaatactgtgcatacataaccttcttgtgcaccatgagtatttggaaagttaatccttgtttttgtcgtgtctataaaggaagaacaaaacaaaataaaaacagagccctagagaaatgctgttactttttatttttacacccatcagatttaaggaaaagactttttagccattataatctagtggttggaaggaatgaagaagcttttttagtaataggtccagatatgagtgctaaaaataaagatgatagcatgttcttctgtcttccatagttattacaactatgagagcctcccaagtcatcttatcaactcaactcccttttttttgtcttaatgttgcacataagtttatacagagtggatgaccacactagcacagaagagaacaacatgtattaaagcaggtgattcctccccttggcgggagagctctctcagtgtgaacatgccttctgtgggcggaaatcaggaagccaccagctgttaatggagagtgccttgcttttatttcagacagcagagttttccaaagtttctctgctcctctaacagcattgctctttagtgtgtgttaacctgtggtttgaaagaaatgctcttgtacattaacaatgtaaatttaaatgattaaattacattttatcaatggca

SEQ ID NO: 130 - protein, 637 aa, Homo sapiens
MHDSIRFGNVDMPCVQAQYSPSPPGSSYAAQTYSSEYTTEIMNPDYTKLTMDLGSTEITATATTSLPSISTFVEGYSSNYELKPSCVYQMQRPLIKVEEGRAPSYHHHHHHHHHHHHHHQQQHQQPSIPPASSPEDEVLPSTSMYFKQSPPSTPTTPAFPPQAGALWDEALPSAPGCIAPGPLLDPPMKAVPTVAGARFPLFHFKPSPPHPPAPSPAGGHHLGYDPTAAAALSLPLGAAAAAGSQAAALESHPYGLPLAKRAAPLAFPPLGLTPSPTASSLLGESPSLPSPPSRSSSSGEGTCAVCGDNAACQHYGVRTCEGCKGFFKRTVQKNAKYVCLANKNCPVDKRRRNRCQYCRFQKCLSVGMVKEVVRTDSLKGRRGRLPSKPKSPLQQEPSQPSPPSPPICMMNALVRALTDSTPRDLDYSRYCPTDQAAAGTDAEHVQQFYNLLTASIDVSRSWAEKIPGFTDLPKEDQTLLIESAFLELFVLRLSIRSNTAEDKFVFCNGLVLHRLQCLRGFGEWLDSIKDFSLNLQSLNLDIQALACLSALSMITERHGLKEPKRVEELCNKITSSLKDHQSKGQALEPTESKVLGALVELRKICTLGLQRIFYLKLEDLVSPPSIIDKLFLDTLPF

SEQ ID NO: 131 - DNA, 3119 bp, Homo sapiens
  CDS (188)...(1573): SF-1 (NR5A1)
ggaggacggacggacagggccagcctgctgtccggctgccgcccgccgtggtgtgagggggtttctgcgcacccacagtcgccaccgtcccacctgggctgccggagcctccccctggacccctggtgcccactgccaccctcatccggtgtgagagcgctgcttccgcttcgcggacgccgcgggcatggactattcgtacgacgaggacctggacgagctgtgccccgtgtgcggggacaaggtgtccggctaccactacggactgctcacgtgtgagagctgcaagggcttcttcaagcgcacggtgcagaacaacaagcactacacgtgcaccgagagccagagctgcaagatcgacaagacgcagcgcaagcgctgtcccttctgccgcttccagaaatgcctgacggtggggatgcgcctggaagccgtgcgcgctgaccgtatgaggggtggccggaacaagtttgggccgatgtacaagcgggaccgggccctgaaacagcagaagaaggcacagattcgggccaatggcttcaagctggagacagggcccccgatgggggtgcccccgccgccccctcccgcaccggactacgtgctgcctcccagcctgcatgggcctgagcccaagggcctggccgccggtccacctgctgggccactgggcgactttggggccccagcactgcccatggccgtgcccggtgcccacgggccactggctggctacctctaccctgcctttcctggccgtgccatcaagtctgagtacccggagccttatgccagccccccacagcctgggctgccgtacggctacccagagcccttctctggagggcccaacgtgcctgagctcatcctgcagctgctgcagctggagccggatgaggaccaggtgcgggcccgcatcttgggctgcctgcaggagcccaccaaaagccgccccgaccagccggcggccttcggcctcctgtgcagaatggccgaccagaccttcatctccatcgtggactgggcacgcaggtgcatggtcttcaaggagctggaggtggccgaccagatgacgctgctgcagaactgctggagcgagctgctggtgttcgaccacatctaccgccaggtccagcacggcaaggagggcagcatcctgctggtcaccgggcaggaggtggagctgaccacagtggccacccaggcgggctcgctgctgcacagcctggtgttgcgggcgcaggagctggtgctgcagctgcttgcgctgcagctggaccggcaggagtttgtctgcctcaagttcatcatcctcttcagcctggatttgaagttcctgaataaccacatcctggtgaaagacgctcaggagaaggccaacgccgccctgcttgactacaccctgtgccactacccgcactgcggggacaaattccagcagctgctgctgtgcctggtggaggtgcgggccctgagcatgcaggccaaggagtacctgtaccacaagcacctgggcaacgagatgccccgcaacaacctgctcatcgaaatgctgcaagccaagcagacttgagcctgggccgggggcggggccgggactgggggcgggactgggggcggggcctgggcggggccgcagccacaccgctggctctgcatggttcattttctgatgcccaccgaggagccccagccccgtcccagaggccgctgcccctgagttctgacactgtgtgtttgggaagtgggtgaggctgggcagggcctggcggaggtggagtggccactggcacttgcctgctgcttggagtgccccaaggaggtggctgttaaccacccgccccgccccctccctgctcccagctctctctcctggagtctgaagcctgcaggtccggggaggaggttcgggattccctggtgggcctcgacgtcccttggatcagaggtcatcccttcctcctctcctggaaacagacagggagaagttgagcaggtatcaactaggggaggagagagggtctccagtgttccccccatagagaccaggagggagagcctctgttttgtaaactaaggataaccgagtttgctaaattgagaggggctattgggccctagaggacactaggagactggttaggacaaaaagaccttctccctagcccttctaccccacctgacctctgcaagagggggcattgatacatcatcgggaaaaaactttgctccaggcatcactgattccctctcccacccaaggagaacgtttggtacaatcgacatcctagccccacccagaggtggccctcccaggctggtatttatctgcaaggttgtagtcaagaggtttttctccccgctttttgtttttaagcttctagacactccttgaaatgtgtgtgtgatggagggaaggggacagatttgaggactgaagctggggcttggggattgccactaagtacagctgatggtttctccccggacactcgcctactaagtacccttggggtggtgctgggtcattacttctgagccccagccccaatccagagaagcgctgttgcccgccctccacccactaggtgaacagcaggatgccctgttgggggcttcaggtctctgtgggtgggaatgcaagtgaacttgggagggggcacgggcctgtagatcagggatagcgctgttgatcccctctctgtggctccaacccgttgggtcccttgctgcaaacccatgaagctggccctcagctccctgaccccctgtcctaggtcatgaaggacactctgcagggtgaagcaccagggagaggcctcggctgtctcctgtccccggcggggtgcctgctgtccgtcccgctttcatgttactgttgcagcttgtgctgagcctgcccagttggaggagactgggcacccctgcctcctgcctcccgcctcccgccaccctgtctcagtacctcccccccccgccccctgaaacatgtgcccctgccaaggccggagacccacagccctgaaacgagaagtgcccttaaggatcaccccagcccccacagccctggaataaatttcgcaattagtttccaaaaaaaaaaaaaaaaaaaaaaaaaa

SEQ ID NO: 132 - protein, 461 aa, Homo sapiens
MDYSYDEDLDELCPVCGDKVSGYHYGLLTCESCKGFFKRTVQNNKHYTCTESQSCKIDKTQRKRCPFCRFQKCLTVGMRLEAVRADRMRGGRNKFGPMYKRDRALKQQKKAQIRANGFKLETGPPMGVPPPPPPAPDYVLPPSLHGPEPKGLAAGPPAGPLGDFGAPALPMAVPGAHGPLAGYLYPAFPGRAIKSEYPEPYASPPQPGLPYGYPEPFSGGPNVPELILQLLQLEPDEDQVRARILGCLQEPTKSRPDQPAAFGLLCRMADQTFISIVDWARRCMVFKELEVADQMTLLQNCWSELLVFDHIYRQVQHGKEGSILLVTGQEVELTTVATQAGSLLHSLVLRAQELVLQLLALQLDRQEFVCLKFIILFSLDLKFLNNHILVKDAQEKANAALLDYTLCHYPHCGDKFQQLLLCLVEVRALSMQAKEYLYHKHLGNEMPRNNLLIEMLQAKQT

SEQ ID NO: 133 - DNA, 4916 bp, Homo sapiens
  CDS (207)...(1694): LRH-1 (NR5A2)
aaaaagtacagagtccagggaaagacttgcttgtaactttatgaattctggatttttttttttcctttgctttttcttaactttcactaagggttactgtagtctgatgtgtccttcccaaggccacgaaatttgacaagctgcacttttcttttgctcaatgatttctgctttaagccaaagaactgcctataatttcactaagaatgtcttctaattcagatactggggatttacaagagtctttaaagcacggacttacacctattgtgtctcaatttaaaatggtgaattactcctatgatgaagatctggaagagctttgtcccgtgtgtggagataaagtgtctgggtaccattatgggctcctcacctgtgaaagctgcaagggattttttaagcgaacagtccaaaataataaaaggtacacatgtatagaaaaccagaactgccaaattgacaaaacacagagaaagcgttgtccttactgtcgttttcaaaaatgtctaagtgttggaatgaagctagaagctgtaagggccgaccgaatgcgtggaggaaggaataagtttgggccaatgtacaagagagacagggccctgaagcaacagaaaaaagccctcatccgagccaatggacttaagctagaagccatgtctcaggtgatccaagctatgccctctgacctgaccatttcctctgcaattcaaaacatccactctgcctccaaaggcctacctctgaaccatgctgccttgcctcctacagactatgacagaagtccctttgtaacatcccccattagcatgacaatgccccctcacggcagcctgcaaggttaccaaacatatggccactttcctagccgggccatcaagtctgagtacccagacccctataccagctcacccgagtccataatgggctattcatatatggatagttaccagacgagctctccagcaagcatcccacatctgatactggaacttttgaagtgtgagccagatgagcctcaagtccaggctaaaatcatggcctatttgcagcaagagcaggctaaccgaagcaagcacgaaaagctgagcacctttgggcttatgtgcaaaatggcagatcaaactctcttctccattgtcgagtgggccaggagtagtatcttcttcagagaacttaaggttgatgaccaaatgaagctgcttcagaactgctggagtgagctcttaatcctcgaccacatttaccgacaagtggtacatggaaaggaaggatccatcttcctggttactgggcaacaagtggactattccataatagcatcacaagccggagccaccctcaacaacctcatgagtcatgcacaggagttagtggcaaaacttcgttctctccagtttgatcaacgagagttcgtatgtctgaaattcttggtgctctttagtttagatgtcaaaaaccttgaaaacttccagctggtagaaggtgtccaggaacaagtcaatgccgccctgctggactacacaatgtgtaactacccgcagcagacagagaaatttggacagctacttcttcgactacccgaaatccgggccatcagtatgcaggctgaagaatacctctactacaagcacctgaacggggatgtgccctataataaccttctcattgaaatgttgcatgccaaaagagcataagttacaacccctaggagctctgctttcaaaacaaaaagagattgggggagtggggagggggaagaagaacaggaagaaaaaaagtactctgaactgctccaagtaacgctaattaaaaacttgctttaaagatattgaatttaaaaaggcataataatcaaatacttaatagcaaataaatgatgtatcagggtatttgtattgcaaactgtgaatcaaaggcttcacagccccagaggattccatataaaagacattgtaatggagtggattgaactcacagatggataccaacacggtcagaagaaaaacggacagaacggttcttgtatatttaaactgatctccactatgaagaaatttaggaactaatcttattaattaggcttatacagcgggggatttgagcttacaggattcctccatggtaaagctgaactgaaacaattctcaagaatgcatcagctgtacctacaatagcccctccctcttcctttgaaggccccagcacctctgccctgtggtcaccgaatctgtactaaggacctgtgttcagccacacccagtggtagctccaccaaatcatgaacagcctaattttgagtgtctgtgtcttagacctgcaaacagctaataggaaattctattaatatgttagcttgccattttaaatatgttctgagggttgttttgtctcgtgttcatgatgttaagaaaatgcaggcagtatccctcatcttatgtaagtgtgaattaatattaagggaaatgactacaaactttcaaagcaaatgctccatagctaaagcaacttagaccttatttctgctactgttgctgaaatgtggctttggcattgttggatttcataaaaaatttctggcaggaagtcttgttagtatacatcagtctttttcatcatccaagtttgtagttcatttaaaaatacaacattaaacacattttgctaggatgtcaaatagtcacagttctaagtagttggaaacaaaattgacgcatgttaatctatgcaaagagaaaggaaaggatgaggtgatgtattgactcaaggttcattcttgctgcaattgaacatcctcaagagttgggatggaaatggtgatttttacatgtgtcctggaaagatattaaagtaattcaaatcttccccaaaggggaaaggaagagagtgatactgacctttttaagtcatagaccaaagtctgctgtagaacaaatatgggaggacaaagaatcgcaaattcttcaaatgactattatcagtattattaacatgcgatgccacaggtatgaaagtcttgccttatttcacaattttaaaaggtagctgtgcagatgtggatcaacatttgtttaaaataaagtattaatactttaaagtcaaataagatatagtgtttacattctttaggtcctgaggggcagggggatctgtgatataacaaaatagcaaaagcggtaatttccttaatgttatttttctgattggtaattatttttaacagtacttaattattctatgtcgtgagacactaaaatcaaaaacgggaatctcatttagactttaatttttttgagattatcggcggcacaatcactttgtagaaactgtaaaaaataaaagtatctcctagtcccttaattttttcataaatatttctggcttttgagtagtgtatttatattgtatatcatactttcaactgtagacaattatgatgctaatttattgtttcttggtttcacctttgtataagatatagccaagactgaagaaaccaaatatatgtgtttactgtagcatgtcttcaaattagtggaacttagttcagggacatagaagagtcttaatgaattaaaatcattcacttgattaaatgtctgtaaatcttcatcattcctactgtagtttatttaatatctattgtaaattatgtgacttgtagcttcctctggttttcaagtaaactcaacaaggtggagtcttacctggttttcctttccaagcattgtaaattgtataccaaagatattagttattacttctgtgtgtacaaagaggattattttattatgtttattaatcacctctaatactcatccacatgaagggtacacattaggtaagctgggcgttgactcatgcgcagtctcagtcacccgtgttatcttcgtggctcaaaggacaatgcaaaatcgccgatcagagctcatacccaaagcattacagagaacagcagcatcattgccctccccagctgaaaaacaagttggctagaagatacatggagaggaatggtgtggtcaacagttaatgaaacggttctatcatgcatgtgtaatgtggatggagacaattataagatttgactataactatttggagggtctttaacattgccaaaaaaacaaatatgttgatttttattttattttattttttattttaagaggcgggatcttgatctcacatgttgcccaggctggccttgaactcctgggctcaagcattcctcctgcctcagcctcccccatagctgggactaggggtgcatgccagcatacctggctacgttgactcttaaaatctatgttctcttattttaaagatacagtgctccccactgaaaattaaacctaaaaaatgtcacatattggtatgttgttaacctggtagattaaatcatgagaatgattagaaagacgggcaacacagcgggttacatccacactgctgatcacaccaacgacaggagctgataagcaagaaagcgtcacagccagcgtctgttcacccaaggttgacaagtgaagtttctctaatgttgattgttagccgatttgtaacctggcatttacttagcaactgccttatcaattacaggatttgccggtaaaagcagactcaaatataaaggtttttggcttaacttggtttattatagttgctctatgtttgtaaacagacaatctctaatgtctgattatttgtatcacagatctgcagctgccttggacttgaatccatgcaatgtttagagtgtgaagtcagttacttgttgatgttttcttactgtatcaatgaaatacatattgtcatgtcagttcttgccaggaacttctcaacaaaatggaattttttttttcagtatttcaataaatattgatatgcccagcctgataatttttaaaaaaaaaaaa

SEQ ID NO: 134 - protein, 495 aa, Homo sapiens
MSSNSDTGDLQESLKHGLTPIVSQFKMVNYSYDEDLEELCPVCGDKVSGYHYGLLTCESCKGFFKRTVQNNKRYTCIENQNCQIDKTQRKRCPYCRFQKCLSVGMKLEAVRADRMRGGRNKFGPMYKRDRALKQQKKALIRANGLKLEAMSQVIQAMPSDLTISSAIQNIHSASKGLPLNHAALPPTDYDRSPFVTSPISMTMPPHGSLQGYQTYGHFPSRAIKSEYPDPYTSSPESIMGYSYMDSYQTSSPASIPHLILELLKCEPDEPQVQAKIMAYLQQEQANRSKHEKLSTFGLMCKMADQTLFSIVEWARSSIFFRELKVDDQMKLLQNCWSELLILDHIYRQVVHGKEGSIFLVTGQQVDYSIIASQAGATLNNLMSHAQELVAKLRSLQFDQREFVCLKFLVLFSLDVKNLENFQLVEGVQEQVNAALLDYTMCNYPQQTEKFGQLLLRLPEIRAISMQAEEYLYYKHLNGDVPYNNLLIEMLHAKRA

SEQ ID NO: 135 - DNA, 4243 bp, Homo sapiens
  CDS (223)...(1665): GCNF (NR6A1) variant 1
ggtctttgacttctttctgaactcaatcttcccgtcacgttcctccaatactgaaggtctctctgcggcgcggagccgggcggctcggggcccagagagagccgcggccgggagctcgcgggctcctgacaacctcctcccctcggcggacgacgaccacggcgactagggcgccggtcatggcggagcaacaaacccggcgcggaccctaggcaccaccgcatggagcgggacgaaccgccgcctagcggagggggaggcggcgggggctcggcggggttcctggagcctcccgccgcgctccctccgccgccgcgcaacggtttctgtcaggatgaattggcagagcttgacccaggcactatttctgtttcagatgatcgggctgaacaacgaacctgtctcatttgtggggaccgcgctacaggcttgcactatgggatcatctcctgtgagggctgcaaagggtttttcaagcggagcatttgcaacaaacgggtatatcgatgcagtcgtgacaagaactgtgtcatgtctcggaagcagaggaacaggtgccagtactgccgcctgctcaaatgcctccagatggggatgaaccggaagactatcagagaagatggcatgcctggaggccggaataagagcattgggccagtccagatatcggaagaagaaatcgaaaggatcatgtctgggcaggagtttgaggaagaggccaatcactggagcaaccatggtgatagtgaccacagttcccctgggaacagggcttcggagagcaaccagccctcaccaggctccacactgtcttccagtaggtctgtggaactgaatggattcatggccttcagggaacagtacatgggaatgtctgtgcctccacattaccaatatataccgcacctttttagctattctggccactcaccacttctgccccaacaagctcgcagcctggatccccagtcatacagtctgattcaccagctgttatcagccgaggacctggaaccattgggcacgcccatgttgattgaagatggatacgctgtgacacaggcagaactatttgccctgctttgccgcctggccgacgagctgctctttaggcagattgcctggatcaagaaactgcctttcttctgcgagctctcaatcaaggattacacgtgcctcttgagctctacgtggcaggagctaatcctgctgtcttccctcaccgtttacagcaagcagatctttggggaactggctgatgtcactgccaagtactcgccctccgatgaagaactacacagatttagtgatgaagggatggaggtgatcgagcggctcatctacctctatcacaagttccatcagctaaaggtcagcaacgaggagtatgcttgcatgaaagcaattaacttcctaaatcaagatatcaggggtctgaccagtgcctcacagctggaacaattgaataaacgatactggtacatttgccaggattttactgaatataaatacacacatcagccgaaccgctttcctgatctcatgatgtgcttacctgagattcgatatattgcaggaaagatggtgaatgtgcccctggagcagctgcccctcctctttaaggtggtgctgcattcctgcaagaccagtgtgggcaaggaatgacctgttccaggcgccctcctcaggccaaccacagcgtcttgggtgggcaggacaggctctggagggaaaagccagagagaccaagatggaggctgtggagcagcatttcccgttgcctccatagcaagaagagtttttgtttgtttgtctgtttttttaacctcatttttctatatatttatttcacgacagagttgaatgtatggccttcaacatgatgcacatgcttttgtgtgaatgcagccaatgcattttcttacagtttacagaatgtgaagatgtttaatgttacagtgttgtcattgtttagaaatagttcttttgtattttgagggagagggtgggatggggctaagatgactatttccataatgttgacaaagatgactacctcaatggaaatggggggtgtggccatccctactttttccacattttctcagcagactcatacatttgtctgtcagagagcaaattgccaaaaaaagccacagaattgccagataaaatggcacactgtaagggcgcaaagtgttgttaggagattcactaagcaaggttggtgagacggcaacagggtaggaggtgaggattgagccacgtcctttccttggaaagcgtgaaaattaagagagtagggcacagtgaccatatttaaggcaggtgtccttccacccaacaagtcctaagggcagaagaatttctgttctcacaccttgctgccccccttacccctgcaccaccatcattgtctaccactgcgaactttccatctaggcaaagtcctggcaatcacttgatccacaggactcgcctcccagctccctcggggcccccagctacctagtttccttacctggatctcctgaggcccaccttcctccttcccactcccttacacatttgacttcctattggccctttgaaaaaccagctgagcagaatgccatgttctgaagcctggtgcccactactgatttattctcctttcaccttgttttcttcaaagggtagtagggcaaggccagactgcaaaaagaatagacactccccttttgaaatctgttcctctcccctccccttcctaccgcaccctcaggtctaaatccgaaaacttcaggcttttttaaacaatgagaaggaccattcacctgtctgctgaccagaaatgttgcccctaagttcttctccaagttctccttttctctccagagtgagaccagttttcctcagggacccaggacacaaagcccaaggcccagagtggctcagctgccccttacttcagcagtggactggccagccaaggcctggagggctggagccagaagcacctggaagggaaggggggctttaaactacctcaggttcctaatggcccggctgctacctctgcagacatggcctggactccttgacctctcactacctgccccaccttatcccaggacgtgttccttaccctcttgactttggccagcgctacaccaggtctgtctttgaactctttcaggtgcttgtcctgcctacacccaggtatctttcacagccagtgtggcaagcagaccacttagttggctgcatgcctgggtaggttggaagggcccacggcaccttcttctgcctatttagtcaaaggctgtttgctgtctcctcaactcaacctagtaaagctacccaggagggcaccacgtcgtgtgcatactgggtagtccatgtctgattgtaattgtttctttctggtgaaatgttacgggtaccagcagagtgatgattttggcccttgatggatctaaaactcggaacattactcctcaatgccgtttccccagttgctctgagaaggaagagacatgttcctcaggaaaagctccagctagcatgtttttcacgtcagtgggaagattcttgtgtgttcgtgtgtatctgtttatttctaagttcacgatacttgttcccctgaattttatttaaccaactagatcacattctttggccacaggtcagactctgagctgctttcctccagatcgggaaggagacacatatcacagatgccttctctaagacagctcctgtgtacagcatcgttctttgctgaggcctctatctgtccaattattatttttgaaattgcttttcaaattaaacattttacccgttgtgttgggtgtcaaaagaaattgctctctgatgaggcaagaacatgtctctccaacaacgtagtattgaacagagcaagttgttaatttgtggagtaggggaaaggttctgcaagttgccattgtacaaatccagttttacaaatgtttgcagcagattccacagacaaagagcccattcattgccgagagccctgcagaatctcagagcaaagtggctgtgtgttccgagccggagcctgacctgtggaccgtctttaatgtcttctgcaccagtccttttatgacgtgggctttttttaaacagggtaaagtgaatgtgttgcattgcaaactcaggtattatgaggagaaggtaggagtgtagctagcagcgtggagacattaggtcagccactagatgtatttgtgaattc

SEQ ID NO: 136 - protein, 480 aa, Homo sapiens
MERDEPPPSGGGGGGGSAGFLEPPAALPPPPRNGFCQDELAELDPGTISVSDDRAEQRTCLICGDRATGLHYGIISCEGCKGFFKRSICNKRVYRCSRDKNCVMSRKQRNRCQYCRLLKCLQMGMNRKTIREDGMPGGRNKSIGPVQISEEEIERIMSGQEFEEEANHWSNHGDSDHSSPGNRASESNQPSPGSTLSSSRSVELNGFMAFREQYMGMSVPPHYQYIPHLFSYSGHSPLLPQQARSLDPQSYSLIHQLLSAEDLEPLGTPMLIEDGYAVTQAELFALLCRLADELLFRQIAWIKKLPFFCELSIKDYTCLLSSTWQELILLSSLTVYSKQIFGELADVTAKYSPSDEELHRFSDEGMEVIERLIYLYHKFHQLKVSNEEYACMKAINFLNQDIRGLTSASQLEQLNKRYWYICQDFTEYKYTHQPNRFPDLMMCLPEIRYIAGKMVNVPLEQLPLLFKVVLHSCKTSVGKE

SEQ ID NO: 137 - DNA, 4195 bp, Homo sapiens
  CDS (187)...(1617): GCNF (NR6A1) variant 2
ggcacgaggcggcgcggaggggcgcggagcggcgcggaaccgggcggctcggggcccagagagagccgcggccgggagctcgcgggctcctgacaacctcctcccctcggcggacgacgaccacggcgactagggcgccggtcatggcggagcaacaaacccggcgcggaccctaggcaccaccgcatggagcgggacgaaccgccgcctagcggagggggaggcggcgggggctcggcggggttcctggagcctcccgccgcgctccctccgccgccgcgcaacggtttctgtcaggatgaattggcagagcttgacccaggcactaatgatcgggctgaacaacgaacctgtctcatttgtggggaccgcgctacaggcttgcactatgggatcatctcctgtgagggctgcaaagggtttttcaagcggagcatttgcaacaaacgggtatatcgatgcagtcgtgacaagaactgtgtcatgtctcggaagcagaggaacaggtgccagtactgccgcctgctcaaatgcctccagatggggatgaaccggaaggctatcagagaagatggcatgcctggaggccggaataagagcattgggccagtccagatatcggaagaagaaatcgaaaggatcatgtctgggcaggagtttgaggaagaggccaatcactggagcaaccatggtgatagtgaccacagttcccctgggaacagggcttcggagagcaaccagccctcaccaggctccacactgtcttccagtaggtctgtggaactgaatggattcatggccttcagggaacagtacatgggaatgtctgtgcctccacattaccaatatataccgcacctttttagctattctggccactcaccacttctgccccaacaagctcgcagcctggatccccagtcatacagtctgattcaccagctgttatcagccgaggacctggaaccattgggcacgcccatgttgattgaagatggatacgctgtgacacaggcagaactatttgccctgctttgccgcctggccgacgagctgctctttaggcagattgcctggatcaagaaactgcctttcttctgcgagctctcaatcaaggattacacgtgcctcttgagctctacgtggcaggagctaatcctgctgtcttccctcaccgtttacagcaagcagatctttggggaactggctgatgtcactgccaagtactcgccctccgatgaagaactacacagatttagtgatgaagggatggaggtgatcgagcggctcatctacctctatcacaagttccatcagctaaaggtcagcaacgaggagtatgcttgcatgaaagcaattaacttcctaaatcaagatatcaggggtctgaccagtgcctcacagctggaacaattgaataaacgatactggtacatttgccaggattttactgaatataaatacacacatcagccgaaccgctttcctgatctcatgatgtgcttacctgagattcgatatattgcaggaaagatggtgaatgtgcccctggagcagctgcccctcctctttaaggtggtgctgcattcctgcaagaccagtgtgggcaaggaatgacctgttccaggcgccctcctcaggccaaccacagcgtcttgggtgggcaggacaggctctggagggaaaagccagagagaccaagatggaggctgtggagcagcatttcccgttgcctccatagcaagaagagtttttgtttgtttgtctgtttttttaacctcatttttctatatatttatttcacgacagagttgaatgtatggccttcaacatgatgcacatgcttttgtgtgaatgcagccaatgcattttcttacagtttacagaatgtgaagatgtttaatgttacagtgttgtcattgtttagaaatagttcttttgtattttgagggagagggtgggatggggctaagatgactatttccataatgttgacaaagatgactacctcaatggaaatggggggtgtggccatccctactttttccacattttctcagcagactcatacatttgtctgtcagagagcaaattgccaaaaaaagccacagaattgccagataaaatggcacactgtaagggcgcaaagtgttgttaggagattcactaagcaaggttggtgagacggcaacagggtaggaggtgaggattgagccacgtcctttccttggaaagcgtgaaaattaagagagtagggcacagtgaccatatttaaggcaggtgtccttccacccaacaagtcctaagggcagaagaatttctgttctcacaccttgctgccccccttacccctgcaccaccatcattgtctaccactgcgaactttccatctaggcaaagtcctggcaatcacttgatccacaggactcgcctcccagctccctcggggcccccagctacctagtttccttacctggatctcctgaggcccaccttcctccttcccactcccttacacatttgacttcctattggccctttgaaaaaccagctgagcagaatgccatgttctgaagcctggtgcccactactgatttattctcctttcaccttgttttcttcaaagggtagtagggcaaggccagactgcaaaaagaatagacactccccttttgaaatctgttcctctcccctccccttcctaccgcaccctcaggtctaaatccgaaaacttcaggcttttttaaacaatgagaaggaccattcacctgtctgctgaccagaaatgttgcccctaagttcttctccaagttctccttttctctccagagtgagaccagttttcctcagggacccaggacacaaagcccaaggcccagagtggctcagctgccccttacttcagcagtggactggccagccaaggcctggagggctggagccagaagcacctggaagggaaggggggctttaaactacctcaggttcctaatggcccggctgctacctctgcagacatggcctggactccttgacctctcactacctgccccaccttatcccaggacgtgttccttaccctcttgactttggccagcgctacaccaggtctgtctttgaactctttcaggtgcttgtcctgcctacacccaggtatctttcacagccagtgtggcaagcagaccacttagttggctgcatgcctgggtaggttggaagggcccacggcaccttcttctgcctatttagtcaaaggctgtttgctgtctcctcaactcaacctagtaaagctacccaggagggcaccacgtcgtgtgcatactgggtagtccatgtctgattgtaattgtttctttctggtgaaatgttacgggtaccagcagagtgatgattttggcccttgatggatctaaaactcggaacattactcctcaatgccgtttccccagttgctctgagaaggaagagacatgttcctcaggaaaagctccagctagcatgtttttcacgtcagtgggaagattcttgtgtgttcgtgtgtatctgtttatttctaagttcacgatacttgttcccctgaattttatttaaccaactagatcacattctttggccacaggtcagactctgagctgctttcctccagatcgggaaggagacacatatcacagatgccttctctaagacagctcctgtgtacagcatcgttctttgctgaggcctctatctgtccaattattatttttgaaattgcttttcaaattaaacattttacccgttgtgttgggtgtcaaaagaaattgctctctgatgaggcaagaacatgtctctccaacaacgtagtattgaacagagcaagttgttaatttgtggagtaggggaaaggttctgcaagttgccattgtacaaatccagttttacaaatgtttgcagcagattccacagacaaagagcccattcattgccgagagccctgcagaatctcagagcaaagtggctgtgtgttccgagccggagcctgacctgtggaccgtctttaatgtcttctgcaccagtccttttatgacgtgggctttttttaaacagggtaaagtgaatgtgttgcattgcaaactcaggtattatgaggagaaggtaggagtgtagctagcagcgtggagacattaggtcagccactagatgtatttgtgaattc

SEQ ID NO: 138 - protein, 476 aa, Homo sapiens
MERDEPPPSGGGGGGGSAGFLEPPAALPPPPRNGFCQDELAELDPGTNDRAEQRTCLICGDRATGLHYGIISCEGCKGFFKRSICNKRVYRCSRDKNCVMSRKQRNRCQYCRLLKCLQMGMNRKAIREDGMPGGRNKSIGPVQISEEEIERIMSGQEFEEEANHWSNHGDSDHSSPGNRASESNQPSPGSTLSSSRSVELNGFMAFREQYMGMSVPPHYQYIPHLFSYSGHSPLLPQQARSLDPQSYSLIHQLLSAEDLEPLGTPMLIEDGYAVTQAELFALLCRLADELLFRQIAWIKKLPFFCELSIKDYTCLLSSTWQELILLSSLTVYSKQIFGELADVTAKYSPSDEELHRFSDEGMEVIERLIYLYHKFHQLKVSNEEYACMKAINFLNQDIRGLTSASQLEQLNKRYWYICQDFTEYKYTHQPNRFPDLMMCLPEIRYIAGKMVNVPLEQLPLLFKVVLHSCKTSVGKE

SEQ ID NO: 139 - DNA, 4129 bp, Homo sapiens
  CDS (187)...(1551): GCNF (NR6A1) variant 3
ggcacgaggcggcgcggaggggcgcggagcggcgcggaaccgggcggctcggggcccagagagagccgcggccgggagctcgcgggctcctgacaacctcctcccctcggcggacgacgaccacggcgactagggcgccggtcatggcggagcaacaaacccggcgcggaccctaggcaccaccgcatggagcgggacgaacctccgccgccgcgcaacggtttctgtcaggatgaattggcagagcttgacccaggcactaatgatcgggctgaacaacgaacctgtctcatttgtggggaccgcgctacaggcttgcactatgggatcatctcctgtgagggctgcaaagggtttttcaagcggagcatttgcaacaaacgggtatatcgatgcagtcgtgacaagaactgtgtcatgtctcggaagcagaggaacaggtgccagtactgccgcctgctcaaatgcctccagatggggatgaaccggaaggctatcagagaagatggcatgcctggaggccggaataagagcattgggccagtccagatatcggaagaagaaatcgaaaggatcatgtctgggcaggagtttgaggaagaggccaatcactggagcaaccatggtgatagtgaccacagttcccctgggaacagggcttcggagagcaaccagccctcaccaggctccacactgtcttccagtaggtctgtggaactgaatggattcatggccttcagggaacagtacatgggaatgtctgtgcctccacattaccaatatataccgcacctttttagctattctggccactcaccacttctgccccaacaagctcgcagcctggatccccagtcatacagtctgattcaccagctgttatcagccgaggacctggaaccattgggcacgcccatgttgattgaagatggatacgctgtgacacaggcagaactatttgccctgctttgccgcctggccgacgagctgctctttaggcagattgcctggatcaagaaactgcctttcttctgcgagctctcaatcaaggattacacgtgcctcttgagctctacgtggcaggagctaatcctgctgtcttccctcaccgtttacagcaagcagatctttggggaactggctgatgtcactgccaagtactcgccctccgatgaagaactacacagatttagtgatgaagggatggaggtgatcgagcggctcatctacctctatcacaagttccatcagctaaaggtcagcaacgaggagtatgcttgcatgaaagcaattaacttcctaaatcaagatatcaggggtctgaccagtgcctcacagctggaacaattgaataaacgatactggtacatttgccaggattttactgaatataaatacacacatcagccgaaccgctttcctgatctcatgatgtgcttacctgagattcgatatattgcaggaaagatggtgaatgtgcccctggagcagctgcccctcctctttaaggtggtgctgcattcctgcaagaccagtgtgggcaaggaatgacctgttccaggcgccctcctcaggccaaccacagcgtcttgggtgggcaggacaggctctggagggaaaagccagagagaccaagatggaggctgtggagcagcatttcccgttgcctccatagcaagaagagtttttgtttgtttgtctgtttttttaacctcatttttctatatatttatttcacgacagagttgaatgtatggccttcaacatgatgcacatgcttttgtgtgaatgcagccaatgcattttcttacagtttacagaatgtgaagatgtttaatgttacagtgttgtcattgtttagaaatagttcttttgtattttgagggagagggtgggatggggctaagatgactatttccataatgttgacaaagatgactacctcaatggaaatggggggtgtggccatccctactttttccacattttctcagcagactcatacatttgtctgtcagagagcaaattgccaaaaaaagccacagaattgccagataaaatggcacactgtaagggcgcaaagtgttgttaggagattcactaagcaaggttggtgagacggcaacagggtaggaggtgaggattgagccacgtcctttccttggaaagcgtgaaaattaagagagtagggcacagtgaccatatttaaggcaggtgtccttccacccaacaagtcctaagggcagaagaatttctgttctcacaccttgctgccccccttacccctgcaccaccatcattgtctaccactgcgaactttccatctaggcaaagtcctggcaatcacttgatccacaggactcgcctcccagctccctcggggcccccagctacctagtttccttacctggatctcctgaggcccaccttcctccttcccactcccttacacatttgacttcctattggccctttgaaaaaccagctgagcagaatgccatgttctgaagcctggtgcccactactgatttattctcctttcaccttgttttcttcaaagggtagtagggcaaggccagactgcaaaaagaatagacactccccttttgaaatctgttcctctcccctccccttcctaccgcaccctcaggtctaaatccgaaaacttcaggcttttttaaacaatgagaaggaccattcacctgtctgctgaccagaaatgttgcccctaagttcttctccaagttctccttttctctccagagtgagaccagttttcctcagggacccaggacacaaagcccaaggcccagagtggctcagctgccccttacttcagcagtggactggccagccaaggcctggagggctggagccagaagcacctggaagggaaggggggctttaaactacctcaggttcctaatggcccggctgctacctctgcagacatggcctggactccttgacctctcactacctgccccaccttatcccaggacgtgttccttaccctcttgactttggccagcgctacaccaggtctgtctttgaactctttcaggtgcttgtcctgcctacacccaggtatctttcacagccagtgtggcaagcagaccacttagttggctgcatgcctgggtaggttggaagggcccacggcaccttcttctgcctatttagtcaaaggctgtttgctgtctcctcaactcaacctagtaaagctacccaggagggcaccacgtcgtgtgcatactgggtagtccatgtctgattgtaattgtttctttctggtgaaatgttacgggtaccagcagagtgatgattttggcccttgatggatctaaaactcggaacattactcctcaatgccgtttccccagttgctctgagaaggaagagacatgttcctcaggaaaagctccagctagcatgtttttcacgtcagtgggaagattcttgtgtgttcgtgtgtatctgtttatttctaagttcacgatacttgttcccctgaattttatttaaccaactagatcacattctttggccacaggtcagactctgagctgctttcctccagatcgggaaggagacacatatcacagatgccttctctaagacagctcctgtgtacagcatcgttctttgctgaggcctctatctgtccaattattatttttgaaattgcttttcaaattaaacattttacccgttgtgttgggtgtcaaaagaaattgctctctgatgaggcaagaacatgtctctccaacaacgtagtattgaacagagcaagttgttaatttgtggagtaggggaaaggttctgcaagttgccattgtacaaatccagttttacaaatgtttgcagcagattccacagacaaagagcccattcattgccgagagccctgcagaatctcagagcaaagtggctgtgtgttccgagccggagcctgacctgtggaccgtctttaatgtcttctgcaccagtccttttatgacgtgggctttttttaaacagggtaaagtgaatgtgttgcattgcaaactcaggtattatgaggagaaggtaggagtgtagctagcagcgtggagacattaggtcagccactagatgtatttgtgaattc

SEQ ID NO: 140 - protein, 454 aa, Homo sapiens
MERDEPPPPRNGFCQDELAELDPGTNDRAEQRTCLICGDRATGLHYGIISCEGCKGFFKRSICNKRVYRCSRDKNCVMSRKQRNRCQYCRLLKCLQMGMNRKAIREDGMPGGRNKSIGPVQISEEEIERIMSGQEFEEEANHWSNHGDSDHSSPGNRASESNQPSPGSTLSSSRSVELNGFMAFREQYMGMSVPPHYQYIPHLFSYSGHSPLLPQQARSLDPQSYSLIHQLLSAEDLEPLGTPMLIEDGYAVTQAELFALLCRLADELLFRQIAWIKKLPFFCELSIKDYTCLLSSTWQELILLSSLTVYSKQIFGELADVTAKYSPSDEELHRFSDEGMEVIERLIYLYHKFHQLKVSNEEYACMKAINFLNQDIRGLTSASQLEQLNKRYWYICQDFTEYKYTHQPNRFPDLMMCLPEIRYIAGKMVNVPLEQLPLLFKVVLHSCKTSVGKE

SEQ ID NO: 141 - DNA, 1659 bp, Homo sapiens
  CDS (1)...(1413): DAX1 (NR0B1)
atggcgggcgagaaccaccagtggcagggcagcatcctctacaacatgcttatgagcgcgaagcaaacgcgcgcggctcctgaggctccagagacgcggctggtggatcagtgttggggctgttcgtgcggcgatgagcccggggtgggcagagaggggctgctgggcgggcggaacgtggcgctcctgtaccgctgctgcttttgcggtaaagaccacccacggcagggcagcatcctctacagcatgctgacgagcgcaaagcaaacgtacgcggcaccgaaggcgcccgaggcgacgctgggtccgtgctggggctgttcgtgcggctctgatcccggggtgggcagagcggggcttccgggtgggcggcccgtggcactcctgtaccgctgctgcttttgtggtgaagaccacccgcggcagggcagcatcctctacagcttgctcactagctcaaagcaaacgcacgtggctccggcagcgcccgaggcacggccagggggcgcgtggtgggaccgctcctacttcgcgcagaggccagggggtaaagaggcgctaccaggcgggcgggccacggcgcttctgtaccgctgctgcttttgcggtgaagaccacccgcagcagggcagcaccctctactgcgtgcccacgagcacaaatcaagcgcaggcggctccggaggagcggccgagggccccctggtgggacacctcctctggtgcgctgcggccggtggcgctcaagagtccacaggtggtctgcgaggcagcctcagcgggcctgttgaagacgctgcgcttcgtcaagtacttgccctgcttccaggtgctgcccctggaccagcagctggtgctggtgcgcaactgctgggcgtccctgctcatgcttgagctggcccaggaccgcttgcagttcgagactgtggaagtctcggagcccagcatgctgcagaagatcctcaccaccaggcggcgggagaccgggggcaacgagccactgcccgtgcccacgctgcagcaccatttggcaccgccggcggaggccaggaaggtgccctccgcctcccaggtccaagccatcaagtgctttctttccaaatgctggagtctgaacatcagtaccaaggagtacgcctacctcaaggggaccgtgctctttaacccggacgtgccgggcctgcagtgcgtgaagtacattcagggactccagtggggaactcagcaaatactcagtgaacacaccaggatgacgcaccaagggccccatgacagattcatcgaacttaatagtacccttttcctgctgagattcatcaatgccaatgtcattgctgaactgttcttcaggcccatcatcggcacagtcagcatggatgatatgatgctggaaatgctctgtacaaagatataaagtcatgtgggccacacaagtgcagtagtgcagttcaccatgagggaagaataaagagctgtgggcaaaagagtgtaaaatattttaaaataaactttcttaatatttttacatgcagagtattttgatcttcaattaaagaaataattttattcccagcacagtcacaaatttctctgttccatagttaaagaagacatttgccaacaggtagcatagctctgtacatcttttaaaaaaaaaaaa

SEQ ID NO: 142 - protein, 470 aa, Homo sapiens
MAGENHQWQGSILYNMLMSAKQTRAAPEAPETRLVDQCWGCSCGDEPGVGREGLLGGRNVALLYRCCFCGKDHPRQGSILYSMLTSAKQTYAAPKAPEATLGPCWGCSCGSDPGVGRAGLPGGRPVALLYRCCFCGEDHPRQGSILYSLLTSSKQTHVAPAAPEARPGGAWWDRSYFAQRPGGKEALPGGRATALLYRCCFCGEDHPQQGSTLYCVPTSTNQAQAAPEERPRAPWWDTSSGALRPVALKSPQVVCEAASAGLLKTLRFVKYLPCFQVLPLDQQLVLVRNCWASLLMLELAQDRLQFETVEVSEPSMLQKILTTRRRETGGNEPLPVPTLQHHLAPPAEARKVPSASQVQAIKCFLSKCWSLNISTKEYAYLKGTVLFNPDVPGLQCVKYIQGLQWGTQQILSEHTRMTHQGPHDRFIELNSTLFLLRFINANVIAELFFRPIIGTVSMDDMMLEMLCTKI

SEQ ID NO: 143 - DNA, 1168 bp, Homo sapiens
  CDS (30)...(803): SHP (NR0B2)
gagctggaagtgagagcagatccctaaccatgagcaccagccaaccaggggcctgcccatgccagggagctgcaagccgccccgccattctctacgcacttctgagctccagcctcaaggctgtcccccgaccccgtagccgctgcctatgtaggcagcaccggcccgtccagctatgtgcacctcatcgcacctgccgggaggccttggatgttctggccaagacagtggccttcctcaggaacctgccatccttctggcagctgcctccccaggaccagcggcggctgctgcagggttgctggggccccctcttcctgcttgggttggcccaagatgctgtgacctttgaggtggctgaggccccggtgcccagcatactcaagaagattctgctggaggagcccagcagcagtggaggcagtggccaactgccagacagaccccagccctccctggctgcggtgcagtggcttcaatgctgtctggagtccttctggagcctggagcttagccccaaggaatatgcctgcctgaaagggaccatcctcttcaaccccgatgtgccaggcctccaagccgcctcccacattgggcacctgcagcaggaggctcactgggtgctgtgtgaagtcctggaaccctggtgcccagcagcccaaggccgcctgacccgtgtcctcctcacggcctccaccctcaagtccattccgaccagcctgcttggggacctcttctttcgccctatcattggagatgttgacatcgctggccttcttggggacatgcttttgctcaggtgacctgttccagcccaggcagagatcaggtgggcagaggctggcagtgctgattcagcctggccatccccagaggtgacccaatgctcctggaggggcaagcctgtatagacagcacttggctccttaggaacagctcttcactcagccacaccccacattggacttccttggtttggacacagtgctccagctgcctgggaggcttttggtggtccccacagcctctgggccaagactcctgtcccttcttgggatgagaatgaaagcttaggctgcttattggaccagaagtcctatcgactttatacagaactgaattaagttattgatttttgtaataaaaggtatgaaacactaaaaaaaaa

SEQ ID NO: 144 - protein, 257 aa, Homo sapiens
MSTSQPGACPCQGAASRPAILYALLSSSLKAVPRPRSRCLCRQHRPVQLCAPHRTCREALDVLAKTVAFLRNLPSFWQLPPQDQRRLLQGCWGPLFLLGLAQDAVTFEVAEAPVPSILKKILLEEPSSSGGSGQLPDRPQPSLAAVQWLQCCLESFWSLELSPKEYACLKGTILFNPDVPGLQAASHIGHLQQEAHWVLCEVLEPWCPAAQGRLTRVLLTASTLKSIPTSLLGDLFFRPIIGDVDIAGLLGDMLLLR

SEQ ID NO: 145 - DNA, 4669 bp, Homo sapiens
  CDS (202)...(4527): SRC-1 variant 1
ctctgaggggcttagaaattaacaggttgtttatataattggccttaaatgaggtgagagtgaagagactagagccatctctggaaaacatcattatcccattccccgggaagctaccctctggaactcaagatttgaccatatctgttttgaggattcattatgaacaaagaagtctccccaggtgtgaagtttttcaacatgagtggcctcggggacagttcatccgaccctgctaacccagactcacataagaggaaaggatcgccatgtgacacactggcatcaagcacggaaaagaggcgcagggagcaagaaaataaatatttagaagaactagctgagttactgtctgccaacattagtgacattgacagcttgagtgtaaaaccagacaaatgcaagattttgaagaaaacagtcgatcagatacagctaatgaagagaatggaacaagagaaatcaacaactgatgacgatgtacagaaatcagacatctcatcaagtagtcaaggagtgatagaaaaggaatccttgggacctcttcttttggaggctttggatggatttttctttgttgtgaactgtgaagggagaattgtatttgtgtcagagaatgtaaccagctacttaggttacaatcaggaggaattaatgaatacgagcgtctacagcatactgcacgtgggggatcatgcagaatttgtgaagaatctgctaccaaaatcactagtaaatggagttccttggcctcaagaggcaacacgacgaaatagccatacctttaactgcaggatgctaattcaccctccagatgagccagggaccgagaaccaagaagcttgccagcgttatgaagtaatgcagtgtttcactgtgtcacagccaaaatcaattcaagaggatggagaagatttccagtcatgtctgatttgtattgcacggcgattacctcggcctccagctattacgggtgtagaatcctttatgaccaagcaagatactacaggtaaaatcatctctattgatactagttccctgagagctgctggcagaactggttgggaagatttagtgaggaagtgcatttatgcttttttccaacctcagggcagagaaccatcttatgccagacagctgttccaagaagtgatgactcgtggcactgcctccagcccctcctatagattcatattgaatgatgggacaatgcttagcgcccacaccaagtgtaaactttgctaccctcaaagtccagacatgcaacctttcatcatgggaattcatatcatcgacagggagcacagtgggctttctcctcaagatgacactaattctggaatgtcaattccccgagtaaatccctcggtcaatcctagtatctctccagctcatggtgtggctcgttcatccacattgccaccatccaacagcaacatggtatccaccagaataaaccgccagcagagctcagaccttcatagcagcagtcatagtaattctagcaacagccaaggaagtttcggatgctcacccggaagtcagattgtagccaatgttgccttaaaccaaggacaggccagttcacagagcagtaatccctctttaaacctcaataattctcctatggaaggtacaggaatatccctagcacagttcatgtctccaaggagacaggttacttctggattggcaacaaggcccaggatgccaaacaattcctttcctcctaatatttcgacattaagctctcccgttggcatgacaagtagtgcctgtaataataataaccgatcttattcaaacatcccagtaacatctttacagggtatgaatgaaggacccaataactccgttggcttctctgccagttctccagtcctcaggcagatgagctcacagaattcacctagcagattaaatatacaaccagcaaaagctgagtccaaagataacaaagagattgcctcaattttaaatgaaatgattcaatctgacaacagctctagtgatggcaaacctctggattcagggcttctgcataacaatgacagactttcagatggagacagtaaatactctcaaaccagtcacaaactagtgcagcttttgacaacaactgccgaacagcagttacggcatgctgatatagacacaagctgcaaagatgtcctgtcttgcacaggcacttccaactctgcctctgctaactcttcaggaggttcttgtccctcttctcatagctcattgacagaacggcataaaattctacaccggctcttacaggagggtagcccctcagatatcaccactttgtctgtcgagcctgataaaaaggacagtgcatctacttctgtgtcagtgactggacaggtacaaggaaactccagtataaaactagaactggatgcttcaaagaaaaaagaatcaaaagaccatcagctcctacgctatcttttagataaagatgagaaagatttaagatcaactccaaacctgagcctggatgatgtaaaggtgaaagtggaaaagaaagaacagatggatccatgtaatacaaacccaaccccaatgaccaaacccactcctgaggaaataaaactggaggcccagagccagtttacagctgaccttgaccagtttgatcagttactgcccacgctggagaaggcagcacagttgccaggcttatgtgagacagacaggatggatggtgcggtcaccagtgtaaccatcaaatcggagatcctgccagcttcacttcagtccgccactgccagacccacttccaggctaaatagattacctgagctggaattggaagcaattgataaccaatttggacaaccaggaacaggcgatcagattccatggacaaataatacagtgacagctataaatcagagtaaatcagaagaccagtgtattagctcacaattagatgagcttctctgtccacccacaacagtagaagggagaaatgatgagaaggctcttcttgaacagctggtatccttccttagtggcaaagatgaaactgagctagctgaactagacagagctctgggaattgacaaacttgttcaggggggtggattagatgtattatcagagagatttccaccacaacaagcaacgccacctttgatcatggaagaaagacccaacctttattcccagccttactcttctccttctcctactgccaatctccctagccctttccaaggcatggtcaggcaaaaaccttcactggggacgatgcctgttcaagtaacacctccccgaggtgctttttcacctggcatgggcatgcagcccaggcaaactctaaacagacctccggctgcacctaaccagcttcgacttcaactacagcagcgattacagggacaacagcagttgatacaccaaaatcggcaagctatcttaaaccagtttgcagcaactgctcctgttggcatcaatatgagatcaggcatgcaacagcaaattacacctcagccacccctgaatgctcaaatgttggcacaacgtcagcgggaactgtacagtcaacagcaccgacagaggcagctaatacagcagcaaagagccatgcttatgaggcagcaaagctttgggaacaacctccctccctcatctggactaccagttcaaatggggaacccccgtcttcctcagggtgctccacagcaattcccctatccaccaaactatggtacaaatccaggaaccccacctgcttctaccagcccgttttcacaactagcagcaaatcctgaagcatccttggccaaccgcaacagcatggtgagcagaggcatgacaggaaacataggaggacagtttggcactggaatcaatcctcagatgcagcagaatgtcttccagtatccaggagcaggaatggttccccaaggtgaggccaactttgctccatctctaagccctgggagctccatggtgccgatgccaatccctcctcctcagagttctctgctccagcaaactccacctgcctccgggtatcagtcaccagacatgaaggcctggcagcaaggagcgataggaaacaacaatgtgttcagtcaagctgtccagaaccagcccacgcctgcacagccaggagtatacaacaacatgagcatcaccgtttccatggcaggtggaaatacgaatgttcagaacatgaacccaatgatggcccagatgcagatgagctctttgcagatgccaggaatgaacactgtgtgccctgagcagataaatgatcccgcactgagacacacaggcctctactgcaaccagctctcatccactgaccttctcaaaacagaagcagatggaacccagcaggtgcaacaggttcaggtgtttgctgacgtccagtgtacagtgaatctggtaggcggggacccttacctgaaccagcctggtccactgggaactcaaaagcccacgtcaggaccacagaccccccaggcccagcagaagagcctccttcagcagctactgactgaataaccacttttaaaggaatgtgaaatttaaataatagacatacagagatatacaaatatattatatatttttctgagatttttgatatctcaatctgcagccattcttcaggtcgtagcatttggagcaaaaaaaaaaaaaaaaa

SEQ ID NO: 146 - protein, 1441 aa, Homo sapiens
MSGLGDSSSDPANPDSHKRKGSPCDTLASSTEKRRREQENKYLEELAELLSANISDIDSLSVKPDKCKILKKTVDQIQLMKRMEQEKSTTDDDVQKSDISSSSQGVIEKESLGPLLLEALDGFFFVVNCEGRIVFVSENVTSYLGYNQEELMNTSVYSILHVGDHAEFVKNLLPKSLVNGVPWPQEATRRNSHTFNCRMLIHPPDEPGTENQEACQRYEVMQCFTVSQPKSIQEDGEDFQSCLICIARRLPRPPAITGVESFMTKQDTTGKIISIDTSSLRAAGRTGWEDLVRKCIYAFFQPQGREPSYARQLFQEVMTRGTASSPSYRFILNDGTMLSAHTKCKLCYPQSPDMQPFIMGIHIIDREHSGLSPQDDTNSGMSIPRVNPSVNPSISPAHGVARSSTLPPSNSNMVSTRINRQQSSDLHSSSHSNSSNSQGSFGCSPGSQIVANVALNQGQASSQSSNPSLNLNNSPMEGTGISLAQFMSPRRQVTSGLATRPRMPNNSFPPNISTLSSPVGMTSSACNNNNRSYSNIPVTSLQGMNEGPNNSVGFSASSPVLRQMSSQNSPSRLNIQPAKAESKDNKEIASILNEMIQSDNSSSDGKPLDSGLLHNNDRLSDGDSKYSQTSHKLVQLLTTTAEQQLRHADIDTSCKDVLSCTGTSNSASANSSGGSCPSSHSSLTERHKILHRLLQEGSPSDITTLSVEPDKKDSASTSVSVTGQVQGNSSIKLELDASKKKESKDHQLLRYLLDKDEKDLRSTPNLSLDDVKVKVEKKEQMDPCNTNPTPMTKPTPEEIKLEAQSQFTADLDQFDQLLPTLEKAAQLPGLCETDRMDGAVTSVTIKSEILPASLQSATARPTSRLNRLPELELEAIDNQFGQPGTGDQIPWTNNTVTAINQSKSEDQCISSQLDELLCPPTTVEGRNDEKALLEQLVSFLSGKDETELAELDRALGIDKLVQGGGLDVLSERFPPQQATPPLIMEERPNLYSQPYSSPSPTANLPSPFQGMVRQKPSLGTMPVQVTPPRGAFSPGMGMQPRQTLNRPPAAPNQLRLQLQQRLQGQQQLIHQNRQAILNQFAATAPVGINMRSGMQQQITPQPPLNAQMLAQRQRELYSQQHRQRQLIQQQRAMLMRQQSFGNNLPPSSGLPVQMGNPRLPQGAPQQFPYPPNYGTNPGTPPASTSPFSQLAANPEASLANRNSMVSRGMTGNIGGQFGTGINPQMQQNVFQYPGAGMVPQGEANFAPSLSPGSSMVPMPIPPPQSSLLQQTPPASGYQSPDMKAWQQGAIGNNNVFSQAVQNQPTPAQPGVYNNMSITVSMAGGNTNVQNMNPMMAQMQMSSLQMPGMNTVCPEQINDPALRHTGLYCNQLSSTDLLKTEADGTQQVQQVQVFADVQCTVNLVGGDPYLNQPGPLGTQKPTSGPQTPQAQQKSLLQQLLTE

SEQ ID NO: 147 - DNA, 4721 bp, Homo sapiens
  CDS (202)...(4401): SRC-1 variant 2
ctctgaggggcttagaaattaacaggttgtttatataattggccttaaatgaggtgagagtgaagagactagagccatctctggaaaacatcattatcccattccccgggaagctaccctctggaactcaagatttgaccatatctgttttgaggattcattatgaacaaagaagtctccccaggtgtgaagtttttcaacatgagtggcctcggggacagttcatccgaccctgctaacccagactcacataagaggaaaggatcgccatgtgacacactggcatcaagcacggaaaagaggcgcagggagcaagaaaataaatatttagaagaactagctgagttactgtctgccaacattagtgacattgacagcttgagtgtaaaaccagacaaatgcaagattttgaagaaaacagtcgatcagatacagctaatgaagagaatggaacaagagaaatcaacaactgatgacgatgtacagaaatcagacatctcatcaagtagtcaaggagtgatagaaaaggaatccttgggacctcttcttttggaggctttggatggatttttctttgttgtgaactgtgaagggagaattgtatttgtgtcagagaatgtaaccagctacttaggttacaatcaggaggaattaatgaatacgagcgtctacagcatactgcacgtgggggatcatgcagaatttgtgaagaatctgctaccaaaatcactagtaaatggagttccttggcctcaagaggcaacacgacgaaatagccatacctttaactgcaggatgctaattcaccctccagatgagccagggaccgagaaccaagaagcttgccagcgttatgaagtaatgcagtgtttcactgtgtcacagccaaaatcaattcaagaggatggagaagatttccagtcatgtctgatttgtattgcacggcgattacctcggcctccagctattacgggtgtagaatcctttatgaccaagcaagatactacaggtaaaatcatctctattgatactagttccctgagagctgctggcagaactggttgggaagatttagtgaggaagtgcatttatgcttttttccaacctcagggcagagaaccatcttatgccagacagctgttccaagaagtgatgactcgtggcactgcctccagcccctcctatagattcatattgaatgatgggacaatgcttagcgcccacaccaagtgtaaactttgctaccctcaaagtccagacatgcaacctttcatcatgggaattcatatcatcgacagggagcacagtgggctttctcctcaagatgacactaattctggaatgtcaattccccgagtaaatccctcggtcaatcctagtatctctccagctcatggtgtggctcgttcatccacattgccaccatccaacagcaacatggtatccaccagaataaaccgccagcagagctcagaccttcatagcagcagtcatagtaattctagcaacagccaaggaagtttcggatgctcacccggaagtcagattgtagccaatgttgccttaaaccaaggacaggccagttcacagagcagtaatccctctttaaacctcaataattctcctatggaaggtacaggaatatccctagcacagttcatgtctccaaggagacaggttacttctggattggcaacaaggcccaggatgccaaacaattcctttcctcctaatatttcgacattaagctctcccgttggcatgacaagtagtgcctgtaataataataaccgatcttattcaaacatcccagtaacatctttacagggtatgaatgaaggacccaataactccgttggcttctctgccagttctccagtcctcaggcagatgagctcacagaattcacctagcagattaaatatacaaccagcaaaagctgagtccaaagataacaaagagattgcctcaattttaaatgaaatgattcaatctgacaacagctctagtgatggcaaacctctggattcagggcttctgcataacaatgacagactttcagatggagacagtaaatactctcaaaccagtcacaaactagtgcagcttttgacaacaactgccgaacagcagttacggcatgctgatatagacacaagctgcaaagatgtcctgtcttgcacaggcacttccaactctgcctctgctaactcttcaggaggttcttgtccctcttctcatagctcattgacagaacggcataaaattctacaccggctcttacaggagggtagcccctcagatatcaccactttgtctgtcgagcctgataaaaaggacagtgcatctacttctgtgtcagtgactggacaggtacaaggaaactccagtataaaactagaactggatgcttcaaagaaaaaagaatcaaaagaccatcagctcctacgctatcttttagataaagatgagaaagatttaagatcaactccaaacctgagcctggatgatgtaaaggtgaaagtggaaaagaaagaacagatggatccatgtaatacaaacccaaccccaatgaccaaacccactcctgaggaaataaaactggaggcccagagccagtttacagctgaccttgaccagtttgatcagttactgcccacgctggagaaggcagcacagttgccaggcttatgtgagacagacaggatggatggtgcggtcaccagtgtaaccatcaaatcggagatcctgccagcttcacttcagtccgccactgccagacccacttccaggctaaatagattacctgagctggaattggaagcaattgataaccaatttggacaaccaggaacaggcgatcagattccatggacaaataatacagtgacagctataaatcagagtaaatcagaagaccagtgtattagctcacaattagatgagcttctctgtccacccacaacagtagaagggagaaatgatgagaaggctcttcttgaacagctggtatccttccttagtggcaaagatgaaactgagctagctgaactagacagagctctgggaattgacaaacttgttcaggggggtggattagatgtattatcagagagatttccaccacaacaagcaacgccacctttgatcatggaagaaagacccaacctttattcccagccttactcttctccttctcctactgccaatctccctagccctttccaaggcatggtcaggcaaaaaccttcactggggacgatgcctgttcaagtaacacctccccgaggtgctttttcacctggcatgggcatgcagcccaggcaaactctaaacagacctccggctgcacctaaccagcttcgacttcaactacagcagcgattacagggacaacagcagttgatacaccaaaatcggcaagctatcttaaaccagtttgcagcaactgctcctgttggcatcaatatgagatcaggcatgcaacagcaaattacacctcagccacccctgaatgctcaaatgttggcacaacgtcagcgggaactgtacagtcaacagcaccgacagaggcagctaatacagcagcaaagagccatgcttatgaggcagcaaagctttgggaacaacctccctccctcatctggactaccagttcaaatggggaacccccgtcttcctcagggtgctccacagcaattcccctatccaccaaactatggtacaaatccaggaaccccacctgcttctaccagcccgttttcacaactagcagcaaatcctgaagcatccttggccaaccgcaacagcatggtgagcagaggcatgacaggaaacataggaggacagtttggcactggaatcaatcctcagatgcagcagaatgtcttccagtatccaggagcaggaatggttccccaaggtgaggccaactttgctccatctctaagccctgggagctccatggtgccgatgccaatccctcctcctcagagttctctgctccagcaaactccacctgcctccgggtatcagtcaccagacatgaaggcctggcagcaaggagcgataggaaacaacaatgtgttcagtcaagctgtccagaaccagcccacgcctgcacagccaggagtatacaacaacatgagcatcaccgtttccatggcaggtggaaatacgaatgttcagaacatgaacccaatgatggcccagatgcagatgagctctttgcagatgccaggaatgaacactgtgtgccctgagcagataaatgatcccgcactgagacacacaggcctctactgcaaccagctctcatccactgaccttctcaaaacagaagcagatggaacccaggacaagaagacagaagagttcttctctgtggtgactacagactagaggaatgctctacaggtgcaacaggttcaggtgtttgctgacgtccagtgtacagtgaatctggtaggcggggacccttacctgaaccagcctggtccactgggaactcaaaagcccacgtcaggaccacagaccccccaggcccagcagaagagcctccttcagcagctactgactgaataaccacttttaaaggaatgtgaaatttaaataatagacatacagagatatacaaatatattatatatttttctgagatttttgatatctcaatctgcagccattcttcaggtcgtagcatttggagcaaaaaaaaaaaa

SEQ ID NO: 148 - protein, 1399 aa, Homo sapiens
MSGLGDSSSDPANPDSHKRKGSPCDTLASSTEKRRREQENKYLEELAELLSANISDIDSLSVKPDKCKILKKTVDQIQLMKRMEQEKSTTDDDVQKSDISSSSQGVIEKESLGPLLLEALDGFFFVVNCEGRIVFVSENVTSYLGYNQEELMNTSVYSILHVGDHAEFVKNLLPKSLVNGVPWPQEATRRNSHTFNCRMLIHPPDEPGTENQEACQRYEVMQCFTVSQPKSIQEDGEDFQSCLICIARRLPRPPAITGVESFMTKQDTTGKIISIDTSSLRAAGRTGWEDLVRKCIYAFFQPQGREPSYARQLFQEVMTRGTASSPSYRFILNDGTMLSAHTKCKLCYPQSPDMQPFIMGIHIIDREHSGLSPQDDTNSGMSIPRVNPSVNPSISPAHGVARSSTLPPSNSNMVSTRINRQQSSDLHSSSHSNSSNSQGSFGCSPGSQIVANVALNQGQASSQSSNPSLNLNNSPMEGTGISLAQFMSPRRQVTSGLATRPRMPNNSFPPNISTLSSPVGMTSSACNNNNRSYSNIPVTSLQGMNEGPNNSVGFSASSPVLRQMSSQNSPSRLNIQPAKAESKDNKEIASILNEMIQSDNSSSDGKPLDSGLLHNNDRLSDGDSKYSQTSHKLVQLLTTTAEQQLRHADIDTSCKDVLSCTGTSNSASANSSGGSCPSSHSSLTERHKILHRLLQEGSPSDITTLSVEPDKKDSASTSVSVTGQVQGNSSIKLELDASKKKESKDHQLLRYLLDKDEKDLRSTPNLSLDDVKVKVEKKEQMDPCNTNPTPMTKPTPEEIKLEAQSQFTADLDQFDQLLPTLEKAAQLPGLCETDRMDGAVTSVTIKSEILPASLQSATARPTSRLNRLPELELEAIDNQFGQPGTGDQIPWTNNTVTAINQSKSEDQCISSQLDELLCPPTTVEGRNDEKALLEQLVSFLSGKDETELAELDRALGIDKLVQGGGLDVLSERFPPQQATPPLIMEERPNLYSQPYSSPSPTANLPSPFQGMVRQKPSLGTMPVQVTPPRGAFSPGMGMQPRQTLNRPPAAPNQLRLQLQQRLQGQQQLIHQNRQAILNQFAATAPVGINMRSGMQQQITPQPPLNAQMLAQRQRELYSQQHRQRQLIQQQRAMLMRQQSFGNNLPPSSGLPVQMGNPRLPQGAPQQFPYPPNYGTNPGTPPASTSPFSQLAANPEASLANRNSMVSRGMTGNIGGQFGTGINPQMQQNVFQYPGAGMVPQGEANFAPSLSPGSSMVPMPIPPPQSSLLQQTPPASGYQSPDMKAWQQGAIGNNNVFSQAVQNQPTPAQPGVYNNMSITVSMAGGNTNVQNMNPMMAQMQMSSLQMPGMNTVCPEQINDPALRHTGLYCNQLSSTDLLKTEADGTQDKKTEEFFSVVTTD

SEQ ID NO: 149 - DNA, 4660 bp, Homo sapiens
  CDS (195)...(4517): SRC-1 variant 3
ggggcttagaaattaacaggttgtttatataattggccttaaatgaggtgagagtgaagagactagagccatctctggaaaacatcattatcccattccccgggaagctaccctctggaactcaagatttgaccatatctgttttgaggattcattatgaacaaagaagtctcccaggtgtgaagtttttcaacatgagtggcctcggggacagttcatccgaccctgctaacccagactcacataagaggaaaggatcgccatgtgacacactggcatcaagcacggaaaagaggcgcagggagcaagaaaataaatatttagaagaactagctgagttactgtctgccaacattagtgacattgacagcttgagtgtaaaaccagacaaatgcaagattttgaagaaaacagtcgatcagatacagctaatgaagagaatggaacaagagaaatcaacaactgatgacgatgtacagaaatcagacatctcatcaagtagtcaaggagtgatagaaaaggaatccttgggaccccttcttttggaggctttggatggatttttctttgttgtgaactgtgaagggagaattgtatttgtgtcagagaatgtaaccagctacttaggttacaatcaggaggaattaatgaataccagcgtctacagcatactgcacgtgggggatcatgcagaatttgtgaagaatctgctaccaaaatcactagtaaatggagttccttggcctcaagaggcaacacgacgaaatagccatacctttaactgcaggatgctaattcaccctccagatgagccagggaccgagaaccaagaagcttgccagcgttatgaagtaatgcagtgtttcactgtgtcacagccaaaatcaattcaagaggatggagaagatttccagtcatgtctgatttgtattgcacggcgattacctcggcctccagctattacgggtgtagaatcctttatgaccaagcaagatactacaggtaaaatcatctctattgatactagttccctgagagctgctggcagaactggttgggaagatttagtgaggaagtgcatttatgcttttttccaacctcagggcagagaaccatcttatgccagacagctgttccaagaagtgatgactcgtggcactgcctccagcccctcctatagattcatattgaatgatgggacaatgcttagcgcccacaccaagtgtaaactttgctaccctcaaagtccagacatgcaacctttcatcatgggaattcatatcatcgacagggagcacagtgggctttctcctcaagatgacactaattctggaatgtcaattccccgagtaaatccctcggtcaatcctagtatctctccagctcatggtgtggctcgttcatccacattgccaccatccaacagcaacatggtatccaccagaataaaccgccagcagagctcagaccttcatagcagcagtcatagtaattctagcaacagccaaggaagtttcggatgctcacccggaagtcagattgtagccaatgttgccttaaaccaaggacaggccagttcacagagcagtaatccctctttaaacctcaataattctcctatggaaggtacaggaatatccctagcacagttcatgtctccaaggagacaggttacttctggattggcaacaaggcccaggatgccaaacaattcctttcctcctaatatttcgacattaagctctcccgttggcatgacaagtagtgcctgtaataataataaccgatcttattcaaacatcccagtaacatctttacagggtatgaatgaaggacccaataactccgttggcttctctgccagttctccagtcctcaggcagatgagctcacagaattcacctagcagattaaatatacaaccagcaaaagctgagtccaaagataacaaagagattgcctcaattttaaatgaaatgattcaatctgacaacagctctagtgatggcaaacctctggattcagggcttctgcataacaatgacagactttcagatggagacagtaaatactctcaaaccagtcacaaactagtgcagcttttgacaacaactgccgaacagcagttacggcatgctgatatagacacaagctgcaaagatgtcctgtcttgcacaggcacttccaactctgcctctgctaactcttcaggaggttcttgtccctcttctcatagctcattgacagaacggcataaaattctacaccggctcttacaggagggtagcccctcagatatcaccactttgtctgtcgagcctgataaaaaggacagtgcatctacttctgtgtcagtgactggacaggtacaaggaaactccagtataaaactagaactggatgcttcaaagaaaaaagaatcaaaagaccatcagctcctacgctatcttttagataaagatgagaaagatttaagatcaactccaaacctgagcctggatgatgtaaaggtgaaagtggaaaagaaagaacagatggatccatgtaatacaaacccaaccccaatgaccaaacccactcctgaggaaataaaactggaggcccagagccagtttacagctgaccttgaccagtttgatcagttactgcccacgctggagaaggcagcacagttgccaggcttatgtgagacagacaggatggatggtgcggtcaccagtgtaaccatcaaatcggagatcctgccagcttcacttcagtccgccactgccagacccacttccaggctaaatagattacctgagctggaattggaagcaattgataaccaatttggacaaccaggaacaggcgatcagattccatggacaaataatacagtgacagctataaatcagagtaaatcagaagaccagtgtattagctcacaattagatgagcttctctgtccacccacaacagtagaagggagaaatgatgagaaggctcttcttgaacagctggtatccttccttagtggcaaagatgaaactgagctagctgaactagacagagctctgggaattgacaaacttgttcaggggggtggattagatgtattatcagagagatttccaccacaacaagcaacgccacctttgatcatggaagaaagacccaacctttattcccagccttactcttctccttctcctactgccaatctccctagccctttccaaggcatggtcaggcaaaaaccttcactggggacgatgcctgttcaagtaacacctccccgaggtgctttttcacctggcatgggcatgcagcccaggcaaactctaaacagacctccggctgcacctaaccagcttcgacttcaactacagcagcgattacagggacaacagcagttgatacaccaaaatcggcaagctatcttaaaccagtttgcagcaactgctcctgttggcatcaatatgagatcaggcatgcaacagcaaattacacctcagccacccctgaatgctcaaatgttggcacaacgtcagcgggaactgtacagtcaacagcaccgacagaggcagctaatacagcagcaaagagccatgcttatgaggcagcaaagctttgggaacaacctccctccctcatctggactaccagttcaaatggggaacccccgtcttcctcagggtgctccacagcaattcccctatccaccaaactatggtacaaatccaggaaccccacctgcttctaccagcccgttttcacaactagcagcaaatcctgaagcatccttggccaaccgcaacagcatggtgagcagaggcatgacaggaaacataggaggacagtttggcactggaatcaatcctcagatgcagcagaatgtcttccagtatccaggagcaggaatggttccccaaggtgaggccaactttgctccatctctaagccctgggagctccatggtgccgatgccaatccctcctcctcagagttctctgctccagcaaactccacctgcctccgggtatcagtcaccagacatgaaggcctggcagcaaggagcgataggaaacaacaatgtgttcagtcaagctgtccagaaccagcccacgcctgcacagccaggagtatacaacaacatgagcatcaccgtttccatggcaggtggaaatacgaatgttcagaacatgaacccaatgatggcccagatgcagatgagctctttgcagatgccaggaatgaacactgtgtgccctgagcagataaatgatcccgcactgagacacacaggcctctactgcaaccagctctcatccactgaccttctcaaaacagaagcagatggaacccaggtgcaacaggttcaggtgtttgctgacgtccagtgtacagtgaatctggtaggcggggacccttacctgaaccagcctggtccactgggaactcaaaagcccacgtcaggaccacagaccccccaggcccagcagaagagcctccttcagcagctactgactgaataaccacttttaaaggaatgtgaaatttaaataatagacatacagagatatacaaatatattatatatttttctgagatttttgatatctcaatctgcagccattcttcaggtcgtagcatttggagcaaaaaaaaaaaaaaaaaa

SEQ ID NO: 150 - protein, 1440 aa, Homo sapiens
MSGLGDSSSDPANPDSHKRKGSPCDTLASSTEKRRREQENKYLEELAELLSANISDIDSLSVKPDKCKILKKTVDQIQLMKRMEQEKSTTDDDVQKSDISSSSQGVIEKESLGPLLLEALDGFFFVVNCEGRIVFVSENVTSYLGYNQEELMNTSVYSILHVGDHAEFVKNLLPKSLVNGVPWPQEATRRNSHTFNCRMLIHPPDEPGTENQEACQRYEVMQCFTVSQPKSIQEDGEDFQSCLICIARRLPRPPAITGVESFMTKQDTTGKIISIDTSSLRAAGRTGWEDLVRKCIYAFFQPQGREPSYARQLFQEVMTRGTASSPSYRFILNDGTMLSAHTKCKLCYPQSPDMQPFIMGIHIIDREHSGLSPQDDTNSGMSIPRVNPSVNPSISPAHGVARSSTLPPSNSNMVSTRINRQQSSDLHSSSHSNSSNSQGSFGCSPGSQIVANVALNQGQASSQSSNPSLNLNNSPMEGTGISLAQFMSPRRQVTSGLATRPRMPNNSFPPNISTLSSPVGMTSSACNNNNRSYSNIPVTSLQGMNEGPNNSVGFSASSPVLRQMSSQNSPSRLNIQPAKAESKDNKEIASILNEMIQSDNSSSDGKPLDSGLLHNNDRLSDGDSKYSQTSHKLVQLLTTTAEQQLRHADIDTSCKDVLSCTGTSNSASANSSGGSCPSSHSSLTERHKILHRLLQEGSPSDITTLSVEPDKKDSASTSVSVTGQVQGNSSIKLELDASKKKESKDHQLLRYLLDKDEKDLRSTPNLSLDDVKVKVEKKEQMDPCNTNPTPMTKPTPEEIKLEAQSQFTADLDQFDQLLPTLEKAAQLPGLCETDRMDGAVTSVTIKSEILPASLQSATARPTSRLNRLPELELEAIDNQFGQPGTGDQIPWTNNTVTAINQSKSEDQCISSQLDELLCPPTTVEGRNDEKALLEQLVSFLSGKDETELAELDRALGIDKLVQGGGLDVLSERFPPQQATPPLIMEERPNLYSQPYSSPSPTANLPSPFQGMVRQKPSLGTMPVQVTPPRGAFSPGMGMQPRQTLNRPPAAPNQLRLQLQQRLQGQQQLIHQNRQAILNQFAATAPVGINMRSGMQQQITPQPPLNAQMLAQRQRELYSQQHRQRQLIQQQRAMLMRQQSFGNNLPPSSGLPVQMGNPRLPQGAPQQFPYPPNYGTNPGTPPASTSPFSQLAANPEASLANRNSMVSRGMTGNIGGQFGTGINPQMQQNVFQYPGAGMVPQGEANFAPSLSPGSSMVPMPIPPPQSSLLQQTPPASGYQSPDMKAWQQGAIGNNNVFSQAVQNQPTPAQPGVYNNMSITVSMAGGNTNVQNMNPMMAQMQMSSLQMPGMNTVCPEQINDPALRHTGLYCNQLSSTDLLKTEADGTQVQQVQVFADVQCTVNLVGGDPYLNQPGPLGTQKPTSGPQTPQAQQKSLLQQLLTE

SEQ ID NO: 151 - DNA, 6156 bp, Homo sapiens
  CDS (163)...(4557): SRC-2
ggcggccgcagcctcggctacagcttcggcggcgaaggtcagcgccgacggcagccggcacctgacggcgtgaccgacccgagccgatttctcttggatttggctacacacttatagatcttctgcactgtttacaggcacagttgctgatatgtgttcaagatgagtgggatgggagaaaatacctctgacccctccagggcagagacaagaaagcgcaaggaatgtcctgaccaacttggacccagccccaaaaggaacactgaaaaacgtaatcgtgaacaggaaaataaatatatagaagaacttgcagagttgatttttgcaaattttaatgatatagacaactttaacttcaaacctgacaaatgtgcaatcttaaaagaaactgtgaagcaaattcgtcagatcaaagaacaagagaaagcagcagctgccaacatagatgaagtgcagaagtcagatgtatcctctacagggcagggtgtcatcgacaaggatgcgctggggcctatgatgcttgaggcccttgatgggttcttctttgtagtgaacctggaaggcaacgttgtgtttgtgtcagagaatgtgacacagtatctaaggtataaccaagaagagctgatgaacaaaagtgtatatagcatcttgcatgttggggaccacacggaatttgtcaaaaacctgctgccaaagtctatagtaaatgggggatcttggtctggcgaacctccgaggcggaacagccataccttcaattgtcggatgctggtaaaacctttacctgattcagaagaggagggtcatgataaccaggaagctcatcagaaatatgaaactatgcagtgcttcgctgtctctcaaccaaagtccatcaaagaagaaggagaagatttgcagtcctgcttgatttgcgtggcaagaagagttcccatgaaggaaagaccagttcttccctcatcagaaagttttactactcgccaggatctccaaggcaagatcacgtctctggataccagcaccatgagagcagccatgaaaccaggctgggaggacctggtaagaaggtgtattcagaagttccatgcgcagcatgaaggagaatctgtgtcctatgctaagaggcatcatcatgaagtactgagacaaggattggcattcagtcaaatctatcgtttttccttgtctgatggcactcttgttgctgcacaaacgaagagcaaactcatccgttctcagactactaatgaacctcaacttgtaatatctttacatatgcttcacagagagcagaatgtgtgtgtgatgaatccggatctgactggacaaacgatggggaagccactgaatccaattagctctaacagccctgcccatcaggccctgtgcagtgggaacccaggtcaggacatgaccctcagtagcaatataaattttcccataaatggcccaaaggaacaaatgggcatgcccatgggcaggtttggtggttctgggggaatgaaccatgtgtcaggcatgcaagcaaccactcctcagggtagtaactatgcactcaaaatgaacagcccctcacaaagcagccctggcatgaatccaggacagcccacctccatgctttcaccaaggcatcgcatgagccctggagtggctggcagccctcgaatcccacccagtcagttttcccctgcaggaagcttgcattcccctgtgggagtttgcagcagcacaggaaatagccatagttataccaacagctccctcaatgcacttcaggccctcagcgaggggcacggggtctcattagggtcatcgttggcttcaccagacctaaaaatgggcaatttgcaaaactccccagttaatatgaatcctcccccactcagcaagatgggaagcttggactcaaaagactgttttggactatatggggagccctctgaaggtacaactggacaagcagagagcagctgccatcctggagagcaaaaggaaacaaatgaccccaacctgcccccggccgtgagcagtgagagagctgacgggcagagcagactgcatgacagcaaagggcagaccaaactcctgcagctgctgaccaccaaatctgatcagatggagccctcgcccttagccagctctttgtcggatacaaacaaagactccacaggtagcttgcctggttctgggtctacacatggaacctcgctcaaggagaagcataaaattttgcacagactcttgcaggacagcagttcccctgtggacttggccaagttaacagcagaagccacaggcaaagacctgagccaggagtccagcagcacagctcctggatcagaagtgactattaaacaagagccggtgagccccaagaagaaagagaatgcactacttcgctatttgctagataaagatgatactaaagatattggtttaccagaaataacccccaaacttgagagactggacagtaagacagatcctgccagtaacacaaaattaatagcaatgaaaactgagaaggaggagatgagctttgagcctggtgaccagcctggcagtgagctggacaacttggaggagattttggatgatttgcagaatagtcaattaccacagcttttcccagacacgaggccaggcgcccctgctggatcagttgacaagcaagccatcatcaatgacctcatgcaactcacagctgaaaacagccctgtcacacctgttggagcccagaaaacagcactgcgaatttcacagagcacttttaataacccacgaccagggcaactgggcaggttattgccaaaccagaatttaccacttgacatcacattgcaaagcccaactggtgctggacctttcccaccaatcagaaacagtagtccctactcagtgatacctcagccaggaatgatgggtaatcaagggatgataggaaaccaaggaaatttagggaacagtagcacaggaatgattggtaacagtgcttctcggcctactatgccatctggagaatgggcaccgcagagttcggctgtgagagtcacctgtgctgctaccaccagtgccatgaaccggccagtccaaggaggtatgattcggaacccagcagccagcatccccatgaggcccagcagccagcctggccaaagacagacgcttcagtctcaggtcatgaatatagggccatctgaattagagatgaacatggggggacctcagtatagccaacaacaagctcctccaaatcagactgccccatggcctgaaagcatcctgcctatagaccaggcgtcttttgccagccaaaacaggcagccatttggcagttctccagatgacttgctatgtccacatcctgcagctgagtctccgagtgatgagggagctctcctggaccagctgtatctggccttgcggaattttgatggcctggaggagattgatagagccttaggaatacccgaactggtcagccagagccaagcagtagatccagaacagttctcaagtcaggattccaacatcatgctggagcagaaggcgcccgttttcccacagcagtatgcatctcaggcacaaatggcccagggtagctattctcccatgcaagatccaaactttcacaccatgggacagcggcctagttatgccacactccgtatgcagcccagaccgggcctcaggcccacgggcctagtgcagaaccagccaaatcaactaagacttcaacttcagcatcgcctccaagcacagcagaatcgccagccacttatgaatcaaatcagcaatgtttccaatgtgaacttgactctgaggcctggagtaccaacacaggcacctattaatgcacagatgctggcccagagacagagggaaatcctgaaccagcatcttcgacagagacaaatgcatcagcaacagcaagttcagcaacgaactttgatgatgagaggacaagggttgaatatgacaccaagcatggtggctcctagtggtatgccagcaactatgagcaaccctcggattccccaggcaaatgcacagcagtttccatttcctccaaactacggaataagtcagcaacctgatccaggctttactggggctacgactccccagagcccacttatgtcaccccgaatggcacatacacagagtcccatgatgcaacagtctcaggccaacccagcctatcaggccccctccgacataaatggatgggcgcaggggaacatgggcggaaacagcatgttttcccagcagtccccaccacactttgggcagcaagcaaacaccagcatgtacagtaacaacatgaacatcaatgtgtccatggcgaccaacacaggtggcatgagcagcatgaaccagatgacaggacagatcagcatgacctcagtgacctccgtgcctacgtcagggctgtcctccatgggtcccgagcaggttaatgatcctgctctgaggggaggcaacctgttcccaaaccagctgcctggaatggatatgattaagcaggagggagacacaacacggaaatattgctgacactgctgaagccagttgcttcttcagctgaccgggctcacttgctcaaaacacttccagtctggagagctgtgtctatttgtttcaacccaactgacctgccagccggttctgctagagcagacaggcctggccctggttcccagggtggcgtccactcggctgtggcaggaggagctgcctcttctcttgacagtctgaagctcgcatccagacagtcgctcagtctgttccctgcattcaccttagtgcaacttagatctctcctccccaagtaaatgttgacaggccaatttcatacccatgtcagattgaatgtatttaaatgtatgtatttaaggagaaccatgctcttgttctgttcctgttcggttccagacactggtttcttgctttgttttccctggctaacagtctagtgccaaagattaagattttatctgggggaaagaaaagaattttttaaaaaattaaactaaagatgttttaagctaaagcctgaatttgggatggaagcaggacagacaccgtggacagcgctgtatttacagacacacccagtgcgtgaagaccaacaaagtcacagtcgtatctctagaaagctctaaagaccatgttggaaagagtctccagttactgaacagatgaaaaggagcctgtgagagggctgttaacattagcaaatattttttccttgttttttctttgttaaaaccaaactggttcacctgaatcatgaattgagaagaaataattttcatttctaaattaagtcccttttagtttgatcagacagcttgaatcagcatctcttcttccctgtcagcctgactcttcccttcccctctctcattccccatactccctattttcattccttttttaaaaaataatataagctacagaaaccaggtaagccctttatttccttaaatgttttgccagccacttaccaattgctaagtattgaatttcagaaaaaaaaaatgcatttactggcaaggagaagagcaaagttaaggcttgataccaatcgagctaaggatacctgctttggaagcatgtttattctgttccccagcaactctggcctccaaaatgggagaaacgccagtgtgtttaaattgatagcagatatcacgacagatttaacctctgccatgtgttttttattttgttttttagcagtgctgactaagccgaagttttgtaaggtacataaaatccaatttatatgtaaacaagcaataatttaagttgagaacttatgtgttttaattgtataatttttgtgaggtatacatattgtggaattgactcaaaaatgaggtacttcagtattaaattagatatcttcatagcaatgtctcctaaaggtgttttgtaaaggatatcaatgccttgattagacctaatttgtagacttaagactttttattttctaaaccttgtgattctgcttataagtcatttatctaatctatatgatatgcagccgctgtaggaaccaattcttgatttttatatgtttatattctttcttaatgaaccttagaaagactacatgttactaagcaggccacttttatggttgttttt

SEQ ID NO: 152 - protein, 1464 aa, Homo sapiens
MSGMGENTSDPSRAETRKRKECPDQLGPSPKRNTEKRNREQENKYIEELAELIFANFNDIDNFNFKPDKCAILKETVKQIRQIKEQEKAAAANIDEVQKSDVSSTGQGVIDKDALGPMMLEALDGFFFVVNLEGNVVFVSENVTQYLRYNQEELMNKSVYSILHVGDHTEFVKNLLPKSIVNGGSWSGEPPRRNSHTFNCRMLVKPLPDSEEEGHDNQEAHQKYETMQCFAVSQPKSIKEEGEDLQSCLICVARRVPMKERPVLPSSESFTTRQDLQGKITSLDTSTMRAAMKPGWEDLVRRCIQKFHAQHEGESVSYAKRHHHEVLRQGLAFSQIYRFSLSDGTLVAAQTKSKLIRSQTTNEPQLVISLHMLHREQNVCVMNPDLTGQTMGKPLNPISSNSPAHQALCSGNPGQDMTLSSNINFPINGPKEQMGMPMGRFGGSGGMNHVSGMQATTPQGSNYALKMNSPSQSSPGMNPGQPTSMLSPRHRMSPGVAGSPRIPPSQFSPAGSLHSPVGVCSSTGNSHSYTNSSLNALQALSEGHGVSLGSSLASPDLKMGNLQNSPVNMNPPPLSKMGSLDSKDCFGLYGEPSEGTTGQAESSCHPGEQKETNDPNLPPAVSSERADGQSRLHDSKGQTKLLQLLTTKSDQMEPSPLASSLSDTNKDSTGSLPGSGSTHGTSLKEKHKILHRLLQDSSSPVDLAKLTAEATGKDLSQESSSTAPGSEVTIKQEPVSPKKKENALLRYLLDKDDTKDIGLPEITPKLERLDSKTDPASNTKLIAMKTEKEEMSFEPGDQPGSELDNLEEILDDLQNSQLPQLFPDTRPGAPAGSVDKQAIINDLMQLTAENSPVTPVGAQKTALRISQSTFNNPRPGQLGRLLPNQNLPLDITLQSPTGAGPFPPIRNSSPYSVIPQPGMMGNQGMIGNQGNLGNSSTGMIGNSASRPTMPSGEWAPQSSAVRVTCAATTSAMNRPVQGGMIRNPAASIPMRPSSQPGQRQTLQSQVMNIGPSELEMNMGGPQYSQQQAPPNQTAPWPESILPIDQASFASQNRQPFGSSPDDLLCPHPAAESPSDEGALLDQLYLALRNFDGLEEIDRALGIPELVSQSQAVDPEQFSSQDSNIMLEQKAPVFPQQYASQAQMAQGSYSPMQDPNFHTMGQRPSYATLRMQPRPGLRPTGLVQNQPNQLRLQLQHRLQAQQNRQPLMNQISNVSNVNLTLRPGVPTQAPINAQMLAQRQREILNQHLRQRQMHQQQQVQQRTLMMRGQGLNMTPSMVAPSGMPATMSNPRIPQANAQQFPFPPNYGISQQPDPGFTGATTPQSPLMSPRMAHTQSPMMQQSQANPAYQAPSDINGWAQGNMGGNSMFSQQSPPHFGQQANTSMYSNNMNINVSMATNTGGMSSMNQMTGQISMTSVTSVPTSGLSSMGPEQVNDPALRGGNLFPNQLPGMDMIKQEGDTTRKYC

SEQ ID NO: 153 - DNA, 7935 bp, Homo sapiens
  CDS (206)...(4480): SRC-3 variant 1
agcgacggcggcggctgcggcttagtcggtggcggccggcggcggctgcgggctgagcggcgagtttccgatttaaagctgagctgcgaggaaaatggcggcgggaggatcaaaatacttgctggatggtggactcagagaccaataaaaataaactgcttgaacatcctttgactggttagccagttgctgatgtatattcaagatgagtggattaggagaaaacttggatccactggccagtgattcacgaaaacgcaaattgccatgtgatactccaggacaaggtcttacctgcagtggtgaaaaacggagacgggagcaggaaagtaaatatattgaagaattggctgagctgatatctgccaatcttagtgatattgacaatttcaatgtcaaaccagataaatgtgcgattttaaaggaaacagtaagacagatacgtcaaataaaagagcaaggaaaaactatttccaatgatgatgatgttcaaaaagccgatgtatcttctacagggcagggagttattgataaagactccttaggaccgcttttacttcaggcattggatggtttcctatttgtggtgaatcgagacggaaacattgtatttgtatcagaaaatgtcacacaatacctgcaatataagcaagaggacctggttaacacaagtgtttacaatatcttacatgaagaagacagaaaggattttcttaagaatttaccaaaatctacagttaatggagtttcctggacaaatgagacccaaagacaaaaaagccatacatttaattgccgtatgttgatgaaaacaccacatgatattctggaagacataaacgccagtcctgaaatgcgccagagatatgaaacaatgcagtgctttgccctgtctcagccacgagctatgatggaggaaggggaagatttgcaatcttgtatgatctgtgtggcacgccgcattactacaggagaaagaacatttccatcaaaccctgagagctttattaccagacatgatctttcaggaaaggttgtcaatatagatacaaattcactgagatcctccatgaggcctggctttgaagatataatccgaaggtgtattcagagattttttagtctaaatgatgggcagtcatggtcccagaaacgtcactatcaagaagcttatcttaatggccatgcagaaaccccagtatatcgattctcgttggctgatggaactatagtgactgcacagacaaaaagcaaactcttccgaaatcctgtaacaaatgatcgacatggctttgtctcaacccacttccttcagagagaacagaatggatatagaccaaacccaaatcctgttggacaagggattagaccacctatggctggatgcaacagttcggtaggcggcatgagtatgtcgccaaaccaaggcttacagatgccgagcagcagggcctatggcttggcagaccctagcaccacagggcagatgagtggagctaggtatgggggttccagtaacatagcttcattgacccctgggccaggcatgcaatcaccatcttcctaccagaacaacaactatgggctcaacatgagtagccccccacatgggagtcctggtcttgccccaaaccagcagaatatcatgatttctcctcgtaatcgtgggagtccaaagatagcctcacatcagttttctcctgttgcaggtgtgcactctcccatggcatcttctggcaatactgggaaccacagcttttccagcagctctctcagtgccctgcaagccatcagtgaaggtgtggggacttcccttttatctactctgtcatcaccaggccccaaattggataactctcccaatatgaatattacccaaccaagtaaagtaagcaatcaggattccaagagtcctctgggcttttattgcgaccaaaatccagtggagagttcaatgtgtcagtcaaatagcagagatcacctcagtgacaaagaaagtaaggagagcagtgttgagggggcagagaatcaaaggggtcctttggaaagcaaaggtcataaaaaattactgcagttacttacctgttcttctgatgaccggggtcattcctccttgaccaactcccccctagattcaagttgtaaagaatcttctgttagtgtcaccagcccctctggagtctcctcctctacatctggaggagtatcctctacatccaatatgcatgggtcactgttacaagagaagcaccggattttgcacaagttgctgcagaatgggaattcaccagctgaggtagccaagattactgcagaagccactgggaaagacaccagcagtataacttcttgtggggacggaaatgttgtcaagcaggagcagctaagtcctaagaagaaggagaataatgcacttcttagatacctgctggacagggatgatcctagtgatgcactctctaaagaactacagccccaagtggaaggagtggataataaaatgagtcagtgcaccagctccaccattcctagctcaagtcaagagaaagaccctaaaattaagacagagacaagtgaagagggatctggagacttggataatctagatgctattcttggtgatctgactagttctgacttttacaataattccatatcctcaaatggtagtcatctggggactaagcaacaggtgtttcaaggaactaattctctgggtttgaaaagttcacagtctgtgcagtctattcgtcctccatataaccgagcagtgtctctggatagccctgtttctgttggctcaagtcctccagtaaaaaatatcagtgctttccccatgttaccaaagcaacccatgttgggtgggaatccaagaatgatggatagtcaggaaaattatggctcaagtatgggtgggccaaaccgaaatgtgactgtgactcagactccttcctcaggagactggggcttaccaaactcaaaggccggcagaatggaacctatgaattcaaactccatgggaagaccaggaggagattataatacttctttacccagacctgcactgggtggctctattcccacattgcctcttcggtctaatagcataccaggtgcgagaccagtattgcaacagcagcagcagatgcttcaaatgaggcctggtgaaatccccatgggaatgggggctaatccctatggccaagcagcagcatctaaccaactgggttcctggcccgatggcatgttgtccatggaacaagtttctcatggcactcaaaataggcctcttcttaggaattccctggatgatcttgttgggccaccttccaacctggaaggccagagtgacgaaagagcattattggaccagctgcacactcttctcagcaacacagatgccacaggcctggaagaaattgacagagctttgggcattcctgaacttgtcaatcagggacaggcattagagcccaaacaggatgctttccaaggccaagaagcagcagtaatgatggatcagaaggcaggattatatggacagacatacccagcacaggggcctccaatgcaaggaggctttcatcttcagggacaatcaccatcttttaactctatgatgaatcagatgaaccagcaaggcaattttcctctccaaggaatgcacccacgagccaacatcatgagaccccggacaaacacccccaagcaacttagaatgcagcttcagcagaggctgcagggccagcagtttttgaatcagagccgacaggcacttgaattgaaaatggaaaaccctactgctggtggtgctgcggtgatgaggcctatgatgcagccccaggtgagctcccagcagggttttcttaatgctcaaatggtcgcccaacgcagcagagagctgctaagtcatcacttccgacaacagagggtggctatgatgatgcagcagcagcagcagcagcaacagcagcagcagcagcagcagcagcagcaacagcaacagcaacagcaacagcagcaacagcagcaaacccaggccttcagcccacctcctaatgtgactgcttcccccagcatggatgggcttttggcaggacccacaatgccacaagctcctccgcaacagtttccatatcaaccaaattatggaatgggacaacaaccagatccagcctttggtcgagtgtctagtcctcccaatgcaatgatgtcgtcaagaatgggtccctcccagaatcccatgatgcaacacccgcaggctgcatccatctatcagtcctcagaaatgaagggctggccatcaggaaatttggccaggaacagctccttttcccagcagcagtttgcccaccaggggaatcctgcagtgtatagtatggtgcacatgaatggcagcagtggtcacatgggacagatgaacatgaaccccatgcccatgtctggcatgcctatgggtcctgatcagaaatactgctgacatctctgcaccaggacctcttaaggaaaccactgtacaaatgacactgcactaggattattgggaaggaatcattgttccaggcatccatcttggaagaaaggaccagctttgagctccatcaagggtattttaagtgatgtcatttgagcaggactggattttaagccgaagggcaatatctacgtgtttttcccccctccttctgctgtgtatcatggtgttcaaaacagaaatgttttttggcattccacctcctagggatataattctggagacatggagtgttactgatcataaaacttttgtgtcacttttttctgccttgctagccaaaatctcttaaatacacgtaggtgggccagagaacattggaagaatcaagagagattagaatatctggtttctctagttgcagtattggacaaagagcatagtcccagccttcaggtgtagtagttctgtgttgaccctttgtccagtggaattggtgattctgaattgtcctttactaatggtgttgagttgctctgtccctattatttgccctaggctttctcctaatgaaggttttcatttgccattcatgtcctgtaatacttcacctccaggaactgtcatggatgtccaaatggctttgcagaaaggaaatgagatgacagtatttaatcgcagcagtagcaaacttttcacatgctaatgtgcagctgagtgcactttatttaaaaagaatggataaatgcaatattcttgaggtcttgagggaatagtgaaacacattcctggtttttgcctacacttacgtgttagacaagaactatgatttttttttttaaagtactggtgtcaccctttgcctatatggtagagcaataatgctttttaaaaataaacttctgaaaacccaaggccaggtactgcattctgaatcagaatctcgcagtgtttctgtgaatagatttttttgtaaatatgacctttaagatattgtattatgtaaaatatgtatatacctttttttgtaggtcacaacaactcatttttacagagtttgtgaagctaaatatttaacattgttgatttcagtaagctgtgtggtgaggctaccagtggaagagacatcccttgacttttgtggcctgggggaggggtagtgctccacagcttttccttccccaccccccagccttagatgcctcgctcttttcaatctcttaatctaaatgctttttaaagagattatttgtttagatgtaggcattttaattttttaaaaattcctctaccagaactaagcactttgttaatttggggggaaagaatagatatggggaaataaacttaaaaaaaaatcaggaatttaaaaaaacgagcaatttgaagagaatcttttggattttaagcagtccgaaataatagcaattcatgggctgtgtgtgtgtgtgtatgtgtgtgtgtgtgtgtgtatgtttaattatgttaccttttcatcccctttaggagcgttttcagattttggttgctaagacctgaatcccatattgagatctcgagtagaatccttggtgtggtttctggtgtctgctcagctgtcccctcattctactaatgtgatgctttcattatgtccctgtggattagaatagtgtcagttatttcttaagtaactcagtacccagaacagccagttttactgtgattcagagccacagtctaactgagcaccttttaaacccctccctcttctgccccctaccacttttctgctgttgcctctctttgacacctgttttagtcagttgggaggaagggaaaaatcaagtttaattccctttatctgggttaattcatttggttcaaatagttgacggaattgggtttctgaatgtctgtgaatttcagaggtctctgctagccttggtatcattttctagcaataactgagagccagttaattttaagaatttcacacatttagccaatctttctagatgtctctgaaggtaagatcatttaatatctttgatatgcttacgagtaagtgaatcctgattatttccagacccaccaccagagtggatcttattttcaaagcagtatagacaattatgagtttgccctctttcccctaccaagttcaaaatatatctaagaaagattgtaaatccgaaaacttccattgtagtggcctgtgcttttcagatagtatactctcctgtttggagacagaggaagaaccaggtcagtctgtctctttttcagctcaattgtatctgacccttctttaagttatgtgtgtggggagaaatagaatggtgctcttatctttcttgactttaaaaaaattattaaaaacaaaaaaaaaataaatttttttgcaatcctttcctcagacctggctccaggctaactggaaggcagcactcccttttttatatagtagaaaaatgaagtttattataagtttttatattttctacttgttcatttggtgcaaactcaagatttcttttaataggtgcagtctttgagataatttgtttttacctgtattgccctttatcttttttaggtaattctttgtactcctgctgtctacctctcctcacaccccagcaccccccattttttcaaaccttggtatctgttgggtgaacagtataatcttttcatctgcttttagaatgtgggatatttccagtacctactttttttttttttttttgctgaatccaaagatatataaataaaatatatatattttataaagatcagaatgatataaaggagatacatgtttcttcctttaaaaaataaacggaagttacattgttaatgttcatattatgatgccacttttctaaactgcatctggattgaaaggtgtaaatatcaataacagtgctacttagttatcagtatttaatatctgaggtgagttgggggtatctatattaggggtagggtattacagaagataattggcttgatgtcctagaagttctttgatccagaggtgggtgcagctgaaagtaaacagaatggattgccagttacatgtatgcctgcccagttccctttttatttgcagaagctgtgagttttgttcacaattaggttcctaggagcaaaacctcaaggattgatttattgttttcaactccaaggcacactgttaataaacgagcagggtgttttctctcttcctttctaatatatggagtttcgaagaataaaatatgagagcaatatttaaattctcaggaattgacttatactcttgagaatgaattcagtttcaatcaagtttacattatgttgcttaaaaaaatagaaattattctttatcttgcaaagaattgaaaccacatgaaatgacttatgggggatggtgagctgtgactgctttgctgaccattttggatgtcattgtaaataaaggtttctatttaaaa

SEQ ID NO: 154 - protein, 1424 aa, Homo sapiens
MSGLGENLDPLASDSRKRKLPCDTPGQGLTCSGEKRRREQESKYIEELAELISANLSDIDNFNVKPDKCAILKETVRQIRQIKEQGKTISNDDDVQKADVSSTGQGVIDKDSLGPLLLQALDGFLFVVNRDGNIVFVSENVTQYLQYKQEDLVNTSVYNILHEEDRKDFLKNLPKSTVNGVSWTNETQRQKSHTFNCRMLMKTPHDILEDINASPEMRQRYETMQCFALSQPRAMMEEGEDLQSCMICVARRITTGERTFPSNPESFITRHDLSGKVVNIDTNSLRSSMRPGFEDIIRRCIQRFFSLNDGQSWSQKRHYQEAYLNGHAETPVYRFSLADGTIVTAQTKSKLFRNPVTNDRHGFVSTHFLQREQNGYRPNPNPVGQGIRPPMAGCNSSVGGMSMSPNQGLQMPSSRAYGLADPSTTGQMSGARYGGSSNIASLTPGPGMQSPSSYQNNNYGLNMSSPPHGSPGLAPNQQNIMISPRNRGSPKIASHQFSPVAGVHSPMASSGNTGNHSFSSSSLSALQAISEGVGTSLLSTLSSPGPKLDNSPNMNITQPSKVSNQDSKSPLGFYCDQNPVESSMCQSNSRDHLSDKESKESSVEGAENQRGPLESKGHKKLLQLLTCSSDDRGHSSLTNSPLDSSCKESSVSVTSPSGVSSSTSGGVSSTSNMHGSLLQEKHRILHKLLQNGNSPAEVAKITAEATGKDTSSITSCGDGNVVKQEQLSPKKKENNALLRYLLDRDDPSDALSKELQPQVEGVDNKMSQCTSSTIPSSSQEKDPKIKTETSEEGSGDLDNLDAILGDLTSSDFYNNSISSNGSHLGTKQQVFQGTNSLGLKSSQSVQSIRPPYNRAVSLDSPVSVGSSPPVKNISAFPMLPKQPMLGGNPRMMDSQENYGSSMGGPNRNVTVTQTPSSGDWGLPNSKAGRMEPMNSNSMGRPGGDYNTSLPRPALGGSIPTLPLRSNSIPGARPVLQQQQQMLQMRPGEIPMGMGANPYGQAAASNQLGSWPDGMLSMEQVSHGTQNRPLLRNSLDDLVGPPSNLEGQSDERALLDQLHTLLSNTDATGLEEIDRALGIPELVNQGQALEPKQDAFQGQEAAVMMDQKAGLYGQTYPAQGPPMQGGFHLQGQSPSFNSMMNQMNQQGNFPLQGMHPRANIMRPRTNTPKQLRMQLQQRLQGQQFLNQSRQALELKMENPTAGGAAVMRPMMQPQVSSQQGFLNAQMVAQRSRELLSHHFRQQRVAMMMQQQQQQQQQQQQQQQQQQQQQQQQQQQQQTQAFSPPPNVTASPSMDGLLAGPTMPQAPPQQFPYQPNYGMGQQPDPAFGRVSSPPNAMMSSRMGPSQNPMMQHPQAASIYQSSEMKGWPSGNLARNSSFSQQQFAHQGNPAVYSMVHMNGSSGHMGQMNMNPMPMSGMPMGPDQKYC

SEQ ID NO: 155 - DNA, 7923 bp, Homo sapiens
  CDS (206)...(4468): SRC-3 variant 2
agcgacggcggcggctgcggcttagtcggtggcggccggcggcggctgcgggctgagcggcgagtttccgatttaaagctgagctgcgaggaaaatggcggcgggaggatcaaaatacttgctggatggtggactcagagaccaataaaaataaactgcttgaacatcctttgactggttagccagttgctgatgtatattcaagatgagtggattaggagaaaacttggatccactggccagtgattcacgaaaacgcaaattgccatgtgatactccaggacaaggtcttacctgcagtggtgaaaaacggagacgggagcaggaaagtaaatatattgaagaattggctgagctgatatctgccaatcttagtgatattgacaatttcaatgtcaaaccagataaatgtgcgattttaaaggaaacagtaagacagatacgtcaaataaaagagcaaggaaaaactatttccaatgatgatgatgttcaaaaagccgatgtatcttctacagggcagggagttattgataaagactccttaggaccgcttttacttcaggcattggatggtttcctatttgtggtgaatcgagacggaaacattgtatttgtatcagaaaatgtcacacaatacctgcaatataagcaagaggacctggttaacacaagtgtttacaatatcttacatgaagaagacagaaaggattttcttaagaatttaccaaaatctacagttaatggagtttcctggacaaatgagacccaaagacaaaaaagccatacatttaattgccgtatgttgatgaaaacaccacatgatattctggaagacataaacgccagtcctgaaatgcgccagagatatgaaacaatgcagtgctttgccctgtctcagccacgagctatgatggaggaaggggaagatttgcaatcttgtatgatctgtgtggcacgccgcattactacaggagaaagaacatttccatcaaaccctgagagctttattaccagacatgatctttcaggaaaggttgtcaatatagatacaaattcactgagatcctccatgaggcctggctttgaagatataatccgaaggtgtattcagagattttttagtctaaatgatgggcagtcatggtcccagaaacgtcactatcaagaagcttatcttaatggccatgcagaaaccccagtatatcgattctcgttggctgatggaactatagtgactgcacagacaaaaagcaaactcttccgaaatcctgtaacaaatgatcgacatggctttgtctcaacccacttccttcagagagaacagaatggatatagaccaaacccaaatcctgttggacaagggattagaccacctatggctggatgcaacagttcggtaggcggcatgagtatgtcgccaaaccaaggcttacagatgccgagcagcagggcctatggcttggcagaccctagcaccacagggcagatgagtggagctaggtatgggggttccagtaacatagcttcattgacccctgggccaggcatgcaatcaccatcttcctaccagaacaacaactatgggctcaacatgagtagccccccacatgggagtcctggtcttgccccaaaccagcagaatatcatgatttctcctcgtaatcgtgggagtccaaagatagcctcacatcagttttctcctgttgcaggtgtgcactctcccatggcatcttctggcaatactgggaaccacagcttttccagcagctctctcagtgccctgcaagccatcagtgaaggtgtggggacttcccttttatctactctgtcatcaccaggccccaaattggataactctcccaatatgaatattacccaaccaagtaaagtaagcaatcaggattccaagagtcctctgggcttttattgcgaccaaaatccagtggagagttcaatgtgtcagtcaaatagcagagatcacctcagtgacaaagaaagtaaggagagcagtgttgagggggcagagaatcaaaggggtcctttggaaagcaaaggtcataaaaaattactgcagttacttacctgttcttctgatgaccggggtcattcctccttgaccaactcccccctagattcaagttgtaaagaatcttctgttagtgtcaccagcccctctggagtctcctcctctacatctggaggagtatcctctacatccaatatgcatgggtcactgttacaagagaagcaccggattttgcacaagttgctgcagaatgggaattcaccagctgaggtagccaagattactgcagaagccactgggaaagacaccagcagtataacttcttgtggggacggaaatgttgtcaagcaggagcagctaagtcctaagaagaaggagaataatgcacttcttagatacctgctggacagggatgatcctagtgatgcactctctaaagaactacagccccaagtggaaggagtggataataaaatgagtcagtgcaccagctccaccattcctagctcaagtcaagagaaagaccctaaaattaagacagagacaagtgaagagggatctggagacttggataatctagatgctattcttggtgatctgactagttctgacttttacaataattccatatcctcaaatggtagtcatctggggactaagcaacaggtgtttcaaggaactaattctctgggtttgaaaagttcacagtctgtgcagtctattcgtcctccatataaccgagcagtgtctctggatagccctgtttctgttggctcaagtcctccagtaaaaaatatcagtgctttccccatgttaccaaagcaacccatgttgggtgggaatccaagaatgatggatagtcaggaaaattatggctcaagtatgggtgggccaaaccgaaatgtgactgtgactcagactccttcctcaggagactggggcttaccaaactcaaaggccggcagaatggaacctatgaattcaaactccatgggaagaccaggaggagattataatacttctttacccagacctgcactgggtggctctattcccacattgcctcttcggtctaatagcataccaggtgcgagaccagtattgcaacagcagcagcagatgcttcaaatgaggcctggtgaaatccccatgggaatgggggctaatccctatggccaagcagcagcatctaaccaactgggttcctggcccgatggcatgttgtccatggaacaagtttctcatggcactcaaaataggcctcttcttaggaattccctggatgatcttgttgggccaccttccaacctggaaggccagagtgacgaaagagcattattggaccagctgcacactcttctcagcaacacagatgccacaggcctggaagaaattgacagagctttgggcattcctgaacttgtcaatcagggacaggcattagagcccaaacaggatgctttccaaggccaagaagcagcagtaatgatggatcagaaggcaggattatatggacagacatacccagcacaggggcctccaatgcaaggaggctttcatcttcagggacaatcaccatcttttaactctatgatgaatcagatgaaccagcaaggcaattttcctctccaaggaatgcacccacgagccaacatcatgagaccccggacaaacacccccaagcaacttagaatgcagcttcagcagaggctgcagggccagcagtttttgaatcagagccgacaggcacttgaattgaaaatggaaaaccctactgctggtggtgctgcggtgatgaggcctatgatgcagccccagcagggttttcttaatgctcaaatggtcgcccaacgcagcagagagctgctaagtcatcacttccgacaacagagggtggctatgatgatgcagcagcagcagcagcagcaacagcagcagcagcagcagcagcagcagcaacagcaacagcaacagcaacagcagcaacagcagcaaacccaggccttcagcccacctcctaatgtgactgcttcccccagcatggatgggcttttggcaggacccacaatgccacaagctcctccgcaacagtttccatatcaaccaaattatggaatgggacaacaaccagatccagcctttggtcgagtgtctagtcctcccaatgcaatgatgtcgtcaagaatgggtccctcccagaatcccatgatgcaacacccgcaggctgcatccatctatcagtcctcagaaatgaagggctggccatcaggaaatttggccaggaacagctccttttcccagcagcagtttgcccaccaggggaatcctgcagtgtatagtatggtgcacatgaatggcagcagtggtcacatgggacagatgaacatgaaccccatgcccatgtctggcatgcctatgggtcctgatcagaaatactgctgacatctctgcaccaggacctcttaaggaaaccactgtacaaatgacactgcactaggattattgggaaggaatcattgttccaggcatccatcttggaagaaaggaccagctttgagctccatcaagggtattttaagtgatgtcatttgagcaggactggattttaagccgaagggcaatatctacgtgtttttcccccctccttctgctgtgtatcatggtgttcaaaacagaaatgttttttggcattccacctcctagggatataattctggagacatggagtgttactgatcataaaacttttgtgtcacttttttctgccttgctagccaaaatctcttaaatacacgtaggtgggccagagaacattggaagaatcaagagagattagaatatctggtttctctagttgcagtattggacaaagagcatagtcccagccttcaggtgtagtagttctgtgttgaccctttgtccagtggaattggtgattctgaattgtcctttactaatggtgttgagttgctctgtccctattatttgccctaggctttctcctaatgaaggttttcatttgccattcatgtcctgtaatacttcacctccaggaactgtcatggatgtccaaatggctttgcagaaaggaaatgagatgacagtatttaatcgcagcagtagcaaacttttcacatgctaatgtgcagctgagtgcactttatttaaaaagaatggataaatgcaatattcttgaggtcttgagggaatagtgaaacacattcctggtttttgcctacacttacgtgttagacaagaactatgatttttttttttaaagtactggtgtcaccctttgcctatatggtagagcaataatgctttttaaaaataaacttctgaaaacccaaggccaggtactgcattctgaatcagaatctcgcagtgtttctgtgaatagatttttttgtaaatatgacctttaagatattgtattatgtaaaatatgtatatacctttttttgtaggtcacaacaactcatttttacagagtttgtgaagctaaatatttaacattgttgatttcagtaagctgtgtggtgaggctaccagtggaagagacatcccttgacttttgtggcctgggggaggggtagtgctccacagcttttccttccccaccccccagccttagatgcctcgctcttttcaatctcttaatctaaatgctttttaaagagattatttgtttagatgtaggcattttaattttttaaaaattcctctaccagaactaagcactttgttaatttggggggaaagaatagatatggggaaataaacttaaaaaaaaatcaggaatttaaaaaaacgagcaatttgaagagaatcttttggattttaagcagtccgaaataatagcaattcatgggctgtgtgtgtgtgtgtatgtgtgtgtgtgtgtgtgtatgtttaattatgttaccttttcatcccctttaggagcgttttcagattttggttgctaagacctgaatcccatattgagatctcgagtagaatccttggtgtggtttctggtgtctgctcagctgtcccctcattctactaatgtgatgctttcattatgtccctgtggattagaatagtgtcagttatttcttaagtaactcagtacccagaacagccagttttactgtgattcagagccacagtctaactgagcaccttttaaacccctccctcttctgccccctaccacttttctgctgttgcctctctttgacacctgttttagtcagttgggaggaagggaaaaatcaagtttaattccctttatctgggttaattcatttggttcaaatagttgacggaattgggtttctgaatgtctgtgaatttcagaggtctctgctagccttggtatcattttctagcaataactgagagccagttaattttaagaatttcacacatttagccaatctttctagatgtctctgaaggtaagatcatttaatatctttgatatgcttacgagtaagtgaatcctgattatttccagacccaccaccagagtggatcttattttcaaagcagtatagacaattatgagtttgccctctttcccctaccaagttcaaaatatatctaagaaagattgtaaatccgaaaacttccattgtagtggcctgtgcttttcagatagtatactctcctgtttggagacagaggaagaaccaggtcagtctgtctctttttcagctcaattgtatctgacccttctttaagttatgtgtgtggggagaaatagaatggtgctcttatctttcttgactttaaaaaaattattaaaaacaaaaaaaaaataaatttttttgcaatcctttcctcagacctggctccaggctaactggaaggcagcactcccttttttatatagtagaaaaatgaagtttattataagtttttatattttctacttgttcatttggtgcaaactcaagatttcttttaataggtgcagtctttgagataatttgtttttacctgtattgccctttatcttttttaggtaattctttgtactcctgctgtctacctctcctcacaccccagcaccccccattttttcaaaccttggtatctgttgggtgaacagtataatcttttcatctgcttttagaatgtgggatatttccagtacctactttttttttttttttttgctgaatccaaagatatataaataaaatatatatattttataaagatcagaatgatataaaggagatacatgtttcttcctttaaaaaataaacggaagttacattgttaatgttcatattatgatgccacttttctaaactgcatctggattgaaaggtgtaaatatcaataacagtgctacttagttatcagtatttaatatctgaggtgagttgggggtatctatattaggggtagggtattacagaagataattggcttgatgtcctagaagttctttgatccagaggtgggtgcagctgaaagtaaacagaatggattgccagttacatgtatgcctgcccagttccctttttatttgcagaagctgtgagttttgttcacaattaggttcctaggagcaaaacctcaaggattgatttattgttttcaactccaaggcacactgttaataaacgagcagggtgttttctctcttcctttctaatatatggagtttcgaagaataaaatatgagagcaatatttaaattctcaggaattgacttatactcttgagaatgaattcagtttcaatcaagtttacattatgttgcttaaaaaaatagaaattattctttatcttgcaaagaattgaaaccacatgaaatgacttatgggggatggtgagctgtgactgctttgctgaccattttggatgtcattgtaaataaaggtttctatttaaaa

SEQ ID NO: 156 - protein, 1420 aa, Homo sapiens
MSGLGENLDPLASDSRKRKLPCDTPGQGLTCSGEKRRREQESKYIEELAELISANLSDIDNFNVKPDKCAILKETVRQIRQIKEQGKTISNDDDVQKADVSSTGQGVIDKDSLGPLLLQALDGFLFVVNRDGNIVFVSENVTQYLQYKQEDLVNTSVYNILHEEDRKDFLKNLPKSTVNGVSWTNETQRQKSHTFNCRMLMKTPHDILEDINASPEMRQRYETMQCFALSQPRAMMEEGEDLQSCMICVARRITTGERTFPSNPESFITRHDLSGKVVNIDTNSLRSSMRPGFEDIIRRCIQRFFSLNDGQSWSQKRHYQEAYLNGHAETPVYRFSLADGTIVTAQTKSKLFRNPVTNDRHGFVSTHFLQREQNGYRPNPNPVGQGIRPPMAGCNSSVGGMSMSPNQGLQMPSSRAYGLADPSTTGQMSGARYGGSSNIASLTPGPGMQSPSSYQNNNYGLNMSSPPHGSPGLAPNQQNIMISPRNRGSPKIASHQFSPVAGVHSPMASSGNTGNHSFSSSSLSALQAISEGVGTSLLSTLSSPGPKLDNSPNMNITQPSKVSNQDSKSPLGFYCDQNPVESSMCQSNSRDHLSDKESKESSVEGAENQRGPLESKGHKKLLQLLTCSSDDRGHSSLTNSPLDSSCKESSVSVTSPSGVSSSTSGGVSSTSNMHGSLLQEKHRILHKLLQNGNSPAEVAKITAEATGKDTSSITSCGDGNVVKQEQLSPKKKENNALLRYLLDRDDPSDALSKELQPQVEGVDNKMSQCTSSTIPSSSQEKDPKIKTETSEEGSGDLDNLDAILGDLTSSDFYNNSISSNGSHLGTKQQVFQGTNSLGLKSSQSVQSIRPPYNRAVSLDSPVSVGSSPPVKNISAFPMLPKQPMLGGNPRMMDSQENYGSSMGGPNRNVTVTQTPSSGDWGLPNSKAGRMEPMNSNSMGRPGGDYNTSLPRPALGGSIPTLPLRSNSIPGARPVLQQQQQMLQMRPGEIPMGMGANPYGQAAASNQLGSWPDGMLSMEQVSHGTQNRPLLRNSLDDLVGPPSNLEGQSDERALLDQLHTLLSNTDATGLEEIDRALGIPELVNQGQALEPKQDAFQGQEAAVMMDQKAGLYGQTYPAQGPPMQGGFHLQGQSPSFNSMMNQMNQQGNFPLQGMHPRANIMRPRTNTPKQLRMQLQQRLQGQQFLNQSRQALELKMENPTAGGAAVMRPMMQPQQGFLNAQMVAQRSRELLSHHFRQQRVAMMMQQQQQQQQQQQQQQQQQQQQQQQQQQQQQTQAFSPPPNVTASPSMDGLLAGPTMPQAPPQQFPYQPNYGMGQQPDPAFGRVSSPPNAMMSSRMGPSQNPMMQHPQAASIYQSSEMKGWPSGNLARNSSFSQQQFAHQGNPAVYSMVHMNGSSGHMGQMNMNPMPMSGMPMGPDQKYC

SEQ ID NO: 157 - DNA, 8099 bp, Homo sapiens
atggagacagcaatgtttgtaccagtgtggaaattaaccaacatcaacctgtataccttctcagtgaagagcatatcacccttgctcaacagtctaatagcccatttcaagttatcttatgcccatttggactaaatggcactctcacaggacaggcattcaagatgtctgattcagctacaaaaaaattaattggtgaatggaaacagttctatcctatctcatgttgcttgaaggagatgtctgaagaaaaacaggaagatatggattgggaagatgattctttagctgcagtagaagttcttgttgctggtgtccgaatgatctacccagcatgctttgttctagtccctcagtcagacattcctactcctagccctgtgggatccactcactgttcatcttcttgcttgggtgtccaccaagtgcctgcttccacaagagatcctgctatgtcttcggttacgcttacaccacctacgtctcctgaggaagtccaaacagttgatcctcagtctgtccagaagtgggtcaaattttcttcagtatctgatggcttcaactccgatagtactagccaccatggtgggaaaatacccagaaaattagcaaatcatgtggtggatagagtttggcaagaatgcaatatgaacagagcacagaacaagaggaagtattctgcttcatcaggtggtctatgcgaagaagcgacagctgctaaagtggcatcctgggattttgttgaagccacacaaagaacaaattgcagttgtttgaggcacaaaaatctcaagtcaagaaatgctggacaacaaggacaggcaccatctttaggtcagcaacaacaaatacttcctaagcacaagaccaatgagaagcaagaaaagagtgaaaagccacagaaacgccccttgactccttttcaccatcgtgtgtctgttagtgatgatgttggcatggacgcagattcagccagccaaagacttgtgatctctgctccagacagtcaagtgagattttcaaatatccgaactaatgatgtagcaaagactcctcagatgcatggcaccgaaatggcaaattcacctcaaccacccccacttagtcctcacccttgtgatgtggttgatgaaggagtgactaaaacaccttcaactcctcagagtcaacatttttatcaaatgccaacaccagatcccttggttccttctaaaccaatggaagataggatagacagtttgtcccagtctttcccacctcaatatcaggaagctgtagaacctacagtatatgttggtacagcagtaaacttggaagaagatgaagccaatatagcctggaagtattacaagttcccaaagaaaaaagatgtagagtttttaccacctcaacttccaagtgataaattcaaggatgatccagttggaccttttggacaggaaagtgtaacatcagttacagagttaatggtgcaatgtaagaaacctttaaaagtttctgatgaattagtgcagcaatatcaaattaaaaaccagtgtctttcagcaatagcatctgatgcagaacaagaacctaaaattgatccatatgcatttgttgaaggagatgaggaattcctttttcctgataaaaaagatagacaaaatagtgagagagaagctggaaaaaaacacaaggtagaagatgggacatctagtgtaacagtgttatcacatgaagaagatgctatgtcattatttagtccctctatcaagcaagatgctccacgccctactagtcatgcccgtcctccatcaacaagtttgatttatgactcagacctggctgtctcttatactgaccttgataatctcttcaattctgatgaagatgaactaacacctggatctaaaaaatcagcaaatggatcagatgataaagccagctgcaaggaatcaaagacaggaaatctggacccgttatcttgcataagcactgcagatcttcataaaatgtatcctacaccaccatcattggaacaacatattatgggattttccccaatgaatatgaataataaagaatatggtagtatggatacaacacctggaggaactgttctagaaggaaatagttctagtataggagcgcagttcaaaattgaggttgatgagggattctgtagccccaaaccttctgaaattaaagatttttcttatgtctataagcctgaaaattgtcaaattctagtgggatgttccatgtttgcacctctaaaaactctaccaagccaatatctgccccctatcaaattgccagaagagtgtatttaccgtcagagttggactgttggaaaattggaattgctttcttcagggccttcaatgccattcatcaaagagggtgatggaagtaatatggatcaagaatatggcactgcttatacacctcaaactcatacttcttttgggatgcctcctagcagtgcacctcctagtaacagcggagcaggaattcttccttctccatccacccctcggtttccaactccaaggactccaaggactcctcggactcctcgtggagctggtggacctgctagtgctcaaggttcagtcaaatatgaaaattcagacttgtattcaccagcttctaccccatctacatgcagaccccttaattctgttgaacctgcaactgtcccttccatccctgaagcacacagtctttatgtaaacctcatcctttcagaatcagttatgaatttgtttaaagactgtaactttgatagttgttgcatctgtgtttgcaacatgaacatcaagggtgccgatgttggagtttacattccagatccaacgcaggaagcacaatataggtgtacctgtggcttcagtgctgtcatgaacagaaaatttggaaacaattcaggattatttcttgaagatgaactagatatcataggacgcaatacagactgtggcaaagaagcagaaaaacgttttgaagctctcagggctacctctgctgaacatgttaatggaggactaaaggaatctgaaaaattatctgatgatttgatattattgctacaagatcagtgcactaatttattttcaccctttggagcagcagaccaagatccttttcctaaaagtggtgtaattagcaattgggtacgtgttgaagagcgtgactgttgcaatgactgctaccttgcattagaacatgggcgtcagttcatggataacatgtcaggaggaaaagttgatgaagcacttgtgaaaagttcatgcttacacccctggtccaaaagaaacgatgtgagtatgcagtgctcacaggatatacttcgaatgctcctctctcttcagccagttcttcaggatgccattcagaaaaaaagaacagtaagaccttggggtgttcagggtcctctcacttggcaacaatttcataaaatggctggccgaggctcttatggaactgatgaatccccagaaccactgccaatccccacatttttgttgggttatgattatgattatctggtgctttctccatttgctcttccttattgggagagacttatgctggaaccctatggatctcaaagagatatagcctatgttgtactgtgtccagaaaatgaagccttgttaaatggagcaaaaagcttttttagagatcttactgcaatatatgagtcctgtcgattaggtcaacatagacctgtttctcgactgttaacagatgggatcatgagagttggatctactgcatcaaagaaactatcagaaaagttggtagcagaatggttttctcaggcagctgatggtaacaatgaagcattttctaaactcaagctttatgcacaagtctgcagatatgacctaggtccttatcttgcttccctgccattggacagctctctactttcccagccaaatttagttgcccctacaagtcagtctttgattactccacctcagatgacaaatactggaaatgctaatactccatctgccaccttagcatctgcagcgagcagcactatgacagtgacttcaggtgttgccatatctacttcagttgccacagctaattcaactttgaccacagcttcaacttcatcttcatcatcctccaacttgaatagtggagtatcatcaaataaactaccttcgtttccaccctttggcagtatgaacagtaatgctgcaggatccatgtctacacaagcaaatacagttcagagtggtcagctaggagggcaacagacatcagctctacagacagctgggatttctggagaatcatcttcacttcccactcagccgcatcctgatgtgtctgaaagcacgatggatcgggataaagtgggaatccccacagatggtgattcacatgcagtcacgtatccacctgcaattgttgtttatataattgatccttttacatacgaaaatacagacgagagcactaactcttctagtgtgtggacattggggctacttcgatgctttctagaaatggtccagactcttcctcctcatatcaagagtactgtttctgtacagattattccttgtcagtacctgttgcaacctgtgaagcatgaagatagagaaatctatccccagcatttaaaatccctggctttttcggcctttacccagtgtcggaggccacttccaacatcaaccaatgtgaaaacattgactggctttggtccaggtttagccatggaaactgcccttagaagtcctgatagaccagagtgtattcgactttatgcacctccttttattctggctccagtgaaggacaaacagacagagctaggagaaacatttggagaagctggacagaaatataatgttctttttgtgggatactgtttatcacatgatcaaaggtggattcttgcatcttgcacagatctatatggagaacttttagaaacttgtatcattaacatcgatgttccaaatagggctcgtcggaaaaaaagttctgctagaaaatttggtctacagaaactttgggagtggtgcttaggacttgtacaaatgagttcattgccatggagagttgtaattggtcgtctaggaaggattggtcatggagaattgaaagattggagctgtttgctgagtcgtcgaaacttgcagtctctaagtaaaaggctcaaagacatgtgtagaatgtgtggtatatctgctgcagactcccctagcattctcagtgcttgcttggtggcaatggagccgcaaggctcttttgttattatgccagattctgtgtcaactggttctgtatttggaagaagcacgactctaaatatgcagacatctcagctaaataccccacaggatacatcatgtactcatatacttgtgtttcctacttctgcttctgtgcaagtagcttcagctacttataccactgaaaatttggatttagctttcaatcccaacaatgatggagcagatggaatgggtatctttgatttgttagacacaggagatgatcttgaccctgatatcattaatatccttcctgcttctccaactggttctcctgtacattctccaggatctcattacccccatggaggtgatgcgggcaagggtcagagtactgatcggctactatcaacagaacctcatgaggaagtacctaatattcttcagcaaccattggcccttggttactttgtatcaactgccaaagcaggtccattacctgactggttctggtcagcatgtcctcaagcacaatatcagtgtcccctttttcttaaggcctctttgcacctccacgtgccttcagtgcaatctgacgagctgcttcacagtaaacactcccacccacttgactcaaatcagacttcagatgtcctcaggtttgttttggaacagtacaatgcactctcctggctaacctgtgaccctgcaacccaggacagacgctcatgtctcccaattcattttgtggtgctgaatcagttatataactttattatgaatatgctgtgatcttcatttgatggaactgtgcaagaaaagaacaaggaaaaatggatgtttcgctgcaggattaagttacaattatcttctcagtgaaggtcatttgtgatggggtctaattcttattacttcaacaaatattgttttgacttggggggaggggctataaccctgctatttttcattgactctattgaactctttaggatgatgactgatcatacaaaacgtattataacattttcgtagcaaaattaaccttttttttttccagtcacagtatttgtgaaaagtaatgagccatagtacccagtcatgttaaatgaatattaaaagcatggagaggaaacatgaggaacaatgaatttcaacatatggcttcagaacatgaagatgttcttgtatggattatagtatctagtattcaaaaatgcctgcatctcttctcttatttattgtaagtttttaaatgtataaattgtcttatatttcttaacctcttttataaaaattttcctagaaggtttatactgccttcttgctttaaagcaattggtctaaaatatatgtaatcgtcttaattaaaaagttgcagtagggttgcttttagagtattatttttttgtaagggggtgggtgggacagtaaatttgtattgtctcgatgtacagtttaacggggatagagggggaataatgtccataccattgtgtgtggaggatttacagctaagctgtagttgcagagtacatgtacagtaatgaagttcactgtgtttataaattgaaaaggtaccaggtcttacagcattttatatatcacatctttacagaataacatgatggcaatatacaagtggtattgttaggtggtttaacttagaataaaatgagaattcttcagttatattttgtactatggtttagggctatgactaatatttcaggccatttccggtgaaagaaacttagttttacaagaaaaaccatttgctactgaatgcttaaactaattttagtgtttaatgttacatgcttaaatttttttcagttttaacagtggcatatttaggcatggaaatattattatgaaatttattttcaggatctgctataaggttgaaatttagcccagctctaggcattttacaaattatttttcaagcagtcattcttgattgtttgacttttttttttaaattaaagattgggaatgtatgtgagagtatgcatatgtatgggtgtgtgtgtgtgcgcgcaatcaaactgtggtgtaaatagattctcagtgaattctggtattcagactctattccactagtgaaagaaccattttttaaacttcccttgccttttttatttatttaattttcttggtttggagatgtcagtcccaaacaccagagtctgtacttttctataacacagctcagattaaggtagggcatatgccaaggaggttctcacctccctaaagaagggacttgaattttagggactttaattcacccctccttcaatacaactttcccccttcttgtttgcacatgccaagataactgcttttatgcaggctgtacccccttgaaaaatcctttctacagtgctgctcacaaaagagcccaagttcgcctcctacctgcattgctgacttgaattcacagtcgccgagtctacctagctttcttggaagcagtctagcaaaatttctatttgtacgttcactaattatctacaagaacaaaatcagttgtatttacaaaactctacttcagtgtttgttttagtttttttttttactgaaacttgtttttgtgaatactctgtgcttagaattaaatatcactttcttatgaacaacataacttcttcagattgtgtatatgaaaacattagcaagtcttgttttttctatgaagcaaacacaattggtgacaaaggttgtcaatcatttcttcaaaattataatgcagttctaatggtcagcatattttgatattaaatttaaagatcacctctctgcatttgtttttaaattatgctaatacaccacacattatgttggtatgttttgttctgtactttcttt

SEQ ID NO: 158 - protein, 2005 aa, Homo sapiens
GDSNVCTSVEINQHQPVYLLSEEHITLAQQSNSPFQVILCPFGLNGTLTGQAFKMSDSATKKLIGEWKQFYPISCCLKEMSEEKQEDMDWEDDSLAAVEVLVAGVRMIYPACFVLVPQSDIPTPSPVGSTHCSSSCLGVHQVPASTRDPAMSSVTLTPPTSPEEVQTVDPQSVQKWVKFSSVSDGFNSDSTSHHGGKIPRKLANHVVDRVWQECNMNRAQNKRKYSASSGGLCEEATAAKVASWDFVEATQRTNCSCLRHKNLKSRNAGQQGQAPSLGQQQQILPKHKTNEKQEKSEKPQKRPLTPFHHRVSVSDDVGMDADSASQRLVISAPDSQVRFSNIRTNDVAKTPQMHGTEMANSPQPPPLSPHPCDVVDEGVTKTPSTPQSQHFYQMPTPDPLVPSKPMEDRIDSLSQSFPPQYQEAVEPTVYVGTAVNLEEDEANIAWKYYKFPKKKDVEFLPPQLPSDKFKDDPVGPFGQESVTSVTELMVQCKKPLKVSDELVQQYQIKNQCLSAIASDAEQEPKIDPYAFVEGDEEFLFPDKKDRQNSEREAGKKHKVEDGTSSVTVLSHEEDAMSLFSPSIKQDAPRPTSHARPPSTSLIYDSDLAVSYTDLDNLFNSDEDELTPGSKKSANGSDDKASCKESKTGNLDPLSCISTADLHKMYPTPPSLEQHIMGFSPMNMNNKEYGSMDTTPGGTVLEGNSSSIGAQFKIEVDEGFCSPKPSEIKDFSYVYKPENCQILVGCSMFAPLKTLPSQYLPPIKLPEECIYRQSWTVGKLELLSSGPSMPFIKEGDGSNMDQEYGTAYTPQTHTSFGMPPSSAPPSNSGAGILPSPSTPRFPTPRTPRTPRTPRGAGGPASAQGSVKYENSDLYSPASTPSTCRPLNSVEPATVPSIPEAHSLYVNLILSESVMNLFKDCNFDSCCICVCNMNIKGADVGVYIPDPTQEAQYRCTCGFSAVMNRKFGNNSGLFLEDELDIIGRNTDCGKEAEKRFEALRATSAEHVNGGLKESEKLSDDLILLLQDQCTNLFSPFGAADQDPFPKSGVISNWVRVEERDCCNDCYLALEHGRQFMDNMSGGKVDEALVKSSCLHPWSKRNDVSMQCSQDILRMLLSLQPVLQDAIQKKRTVRPWGVQGPLTWQQFHKMAGRGSYGTDESPEPLPIPTFLLGYDYDYLVLSPFALPYWERLMLEPYGSQRDIAYVVLCPENEALLNGAKSFFRDLTAIYESCRLGQHRPVSRLLTDGIMRVGSTASKKLSEKLVAEWFSQAADGNNEAFSKLKLYAQVCRYDLGPYLASLPLDSSLLSQPNLVAPTSQSLITPPQMTNTGNANTPSATLASAASSTMTVTSGVAISTSVATANSTLTTASTSSSSSSNLNSGVSSNKLPSFPPFGSMNSNAAGSMSTQANTVQSGQLGGQQTSALQTAGISGESSSLPTQPHPDVSESTMDRDKVGIPTDGDSHAVTYPPAIVVYIIDPFTYENTDESTNSSSVWTLGLLRCFLEMVQTLPPHIKSTVSVQIIPCQYLLQPVKHEDREIYPQHLKSLAFSAFTQCRRPLPTSTNVKTLTGFGPGLAMETALRSPDRPECIRLYAPPFILAPVKDKQTELGETFGEAGQKYNVLFVGYCLSHDQRWILASCTDLYGELLETCIINIDVPNRARRKKSSARKFGLQKLWEWCLGLVQMSSLPWRVVIGRLGRIGHGELKDWSCLLSRRNLQSLSKRLKDMCRMCGISAADSPSILSACLVAMEPQGSFVIMPDSVSTGSVFGRSTTLNMQTSQLNTPQDTSCTHILVFPTSASVQVASATYTTENLDLAFNPNNDGADGMGIFDLLDTGDDLDPDIINILPASPTGSPVHSPGSHYPHGGDAGKGQSTDRLLSTEPHEEVPNILQQPLALGYFVSTAKAGPLPDWFWSACPQAQYQCPLFLKASLHLHVPSVQSDELLHSKHSHPLDSNQTSDVLRFVLEQYNALSWLTCDPATQDRRSCLPIHFVVLNQLYNFIMNML

SEQ ID NO: 159 - DNA, 6604 bp, Homo sapiens
  CDS (1)...(6375): DRIP240
gatgagcatggcagtgccaagaacgtcagcttcaatcctgccaagatcagttccaacttcagcagcattattgcagagaaattacgttgtaatacccttcctgacactggtcgcaggaagccccaagtgaaccagaaggataacttctggctggtgactgcacgatcccagagtgccattaacacttggttcactgacttggctggcaccaagccactcacgcaactagccaaaaaggtccccattttcagtaagaaggaagaggtgtttgggtacttagccaaatacacagtgcctgtgatgcgggctgcctggctcattaagatgacctgtgcctactatgcagcaatctctgagaccaaggttaagaagagacatgttgaccctttcatggaatggactcagatcatcaccaagtacttatgggagcagttacagaagatggctgaatactaccggccagggcctgcaggaagtgggggctgtggttccacgatagggcccttgccccatgatgtagaggtggcaatccggcagtgggattacaccgagaagctggccatgttcatgtttcaggatggaatgctggacagacatgagttcctgacctgggtgcttgagtgttttgagaagatccgccctggagaggatgaattgcttaaactgctgctgcctctgcttctccgatactctggggaatttgttcagtctgcatacctgtcccgccggcttgcctacttctgtacacggagactggccctgcagctggatggtgtgagcagtcactcatctcatgttatatctgctcagtcaacaagcacgctacccaccacccctgctcctcagcccccaactagcagcacaccctcgactccctttagtgacctgcttatgtgccctcagcaccggcccctggtttttggcctcagctgtatcctacagaccatcctcctgtgctgtcctagtgccttggtttggcactactcactgactgatagcagaattaagaccggctcaccacttgaccacttgcctattgccccgtccaacctgcccatgccagagggtaacagtgccttcactcagcaggtccgtgcaaagttgcgggagatcgagcagcagatcaaggagcggggacaggcagttgaagttcgctggtctttcgataaatgccaggaagctactgcaggcttcaccattggacgggtacttcatactttggaagtgctggacagccatagttttgaacgctctgacttcagcaactctcttgactccctttgtaaccgaatctttggattgggacctagcaaggatgggcatgagatctcctcagatgatgatgctgtggtgtcattgctatgtgaatgggctgtcagctgcaagcgttctggtcggcatcgtgctatggtggtagccaagctcctggagaagagacaggcggagattgaggctgagcgttgtggagaatcagaagccgcagatgagaagggttccatcgcctctggctccctttctgctcccagtgctcccattttccaggatgtcctcctgcagtttctggatacacaggctcccatgctgacggaccctcgaagtgagagtgagcgggtggaattctttaacttagtactgctgttctgtgaactgattcgacatgatgttttctcccacaacatgtatacttgcactctcatctcccgaggggaccttgcctttggagcccctggtccccggcctccctctccctttgatgatcctgccgatgacccagagcacaaggaggctgaaggcagcagcagcagcaagctggaagatccagggctctcagaatctatggacattgaccctagttccagtgttctctttgaggacatggagaagcctgatttctcattgttctcccctactatgccctgtgaggggaagggcagtccatcccctgagaagccagatgtcgagaaggaggtgaagcccccacccaaggagaagattgaagggacccttggggttctttacgaccagccacgacacgtgcagtacgccacccattttcccatcccccaggaggagtcatgcagccatgagtgcaaccagcggttggtcgtactgtttggggtgggaaagcagcgagatgatgcccgccatgccatcaagaaaatcaccaaggatatcttgaaggttctgaaccgcaaagggacagcagaaactgaccagcttgctcctattgtgcctctgaatcctggagacctgacattcttaggtggggaggatgggcagaagcggcgacgcaaccggcctgaagccttccccactgctgaagatatctttgctaagttccagcacctttcacattatgaccaacaccaggtcacggctcaggtctcccggaatgttctggagcagatcacgagctttgcccttggcatgtcataccacttgcctctggtgcagcatgtgcagttcatcttcgacctcatggaatattcactcagcatcagtggcctcatcgactttgccattcagctgctgaatgaactgagtgtagttgaggctgagctgcttctcaaatcctcggatctggtgggcagctacactactagcctgtgcctgtgcatcgtggctgtcctgcggcactatcatgcctgcctcatcctcaaccaggaccagatggcacaggtctttgaggggctgtgtggcgtcgtgaagcatgggatgaaccggtccgatggctcctctgcagagcgctgtatccttgcttatctctatgatctgtacacctcctgtagccatttaaagaacaaatttggggagctcttcagcgacttttgctcaaaggtgaagaacaccatctactgcaacgtggagccatcggaatcaaatatgcgctgggcacctgagttcatgatcgacactctagagaaccctgcagctcacaccttcacctacacggggctaggcaagagtcttagtgagaaccctgctaaccgctacagctttgtctgcaatgcccttatgcacgtctgtgtggggcaccatgatcccgatagggtgaatgacatcgcaatcctgtgtgcagagctgaccggctattgcaagtcactgagtgcagaatggctaggagtgcttaaggccttgtgctgctcctctaacaatggcacttgtggtttcaacgatctcctctgcaatgttgatgtcagtgacctatcttttcatgactcgctggctacttttgttgccatcctcatcgctcggcagtgtttgctcctggaagatctgattcgctgtgctgccatcccttcactccttaatgctgcttgtagtgaacaggactctgagccaggggcccggcttacctgccgcatcctccttcaccttttcaagacaccgcagctcaatccttgccagtctgatggaaacaagcctacagtaggaatccgctcctcctgcgaccgccacctgctggctgcctcccagaaccgcatcgtggatggagccgtgtttgctgttctcaaggctgtgtttgtacttggggatgcggaactgaaaggttcaggcttcactgtgacaggaggaacagaagaacttccagaggaggagggaggaggtggcagtggtggtcggaggcagggtggccgcaacatctctgtggagacagccagtctggatgtctatgccaagtacgtgctgcgcagcatctgccaacaggaatgggtaggagaacgttgccttaagtctctgtgtgaggacagcaatgacctgcaagacccagtgttgagtagtgcccaggcgcagcgcctcatgcagctcatttgctatccacatcgactgctggacaatgaggatggggaaaacccccagcggcagcgcataaagcgcattctccagaacttggaccagtggaccatgcgccagtcttccttggagctgcagctcatgatcaagcagacccctaacaatgagatgaactccctcttggagaacatcgccaaggccacaatcgaggttttccaacggtcagcagagacagggtcatcttctggaagtactgcaagcaacatgcccagcagcagcaagaccaagcctgtgctcagctctctagagcgctctggtgtatggctggtggcccccctcattgctaaactgcccacctcagtccagggacatgtgttaaaggctgctggggaagaattggagaagggtcagcacctgggttcctcttcacgcaaagaacgtgatcgacaaaagcagaagagcatgtccctattgagccagcagcccttcttatcgctggtgctaacatgtctgaaagggcaggatgaacaacgcgagggactccttacctccctctacagccaggtgcaccagattgtgaataattggcgagatgaccagtacttagatgattgcaaaccaaagcagcttatgcatgaggcactcaaactgcggctcaacctggtggggggcatgtttgacacggtgcagcgcagcacccagcagaccacggagtgggccatgctcctcctggagatcatcatcagcggcactgtcgacatgcagtccaacaatgagctcttcactactgtgttggacatgctgagcgtgctcatcaatgggacattggctgcagacatgtctagcatctcgcaaggtagcatggaggaaaacaagcgtgcatacatgaacctggcgaagaagttgcagaaggagttgggggagcgccagtcagacagtctggaaaaggttcgccagctgctgccactgcccaagcagacccgagatgtcatcacgtgtgagccacagggctcccttatcgataccaagggcaacaagattgctggcttcgattccatcttcaagaaggagggtctacaggtttccaccaaacagaagatctcgccctgggatctttttgaggggttgaagccgtcagcaccactctcttggggctggtttggaacagtccgagtggaccggcgagtggctcgaggagaggagcagcagcggttgctgctctaccacacacacctgaggccccggccccgcgcctattacctggagccactgccactgcccccagaagatgaggagccgcctgctcctaccctgctagagcctgagaaaaaggctccagagccccccaaaactgacaaaccgggggctgctccacccagtactgaggaacgcaagaagaagtccaccaagggcaagaaacgcagccagccagctaccaagacagaggactatggaatgggcccgggtcggagcggcccttatggtgtgacagtgcctccggacctcctgcaccacccaaaccctggttctataacacaccttaactacaggcaaggctccataggcctgtacacccagaaccagccactacctgcaggtggccctcgtgtggacccataccgtcctgtgcgcttaccaatgcagaagctgcccacccgaccaacttaccctggagtgctgcccacaaccatgactggcgtcatgggtttagaaccctcctcttataagacctctgtgtaccggcagcagcaacctgcggtgccccaaggacagcgccttcgccaacagctccagcagagtcagggcatgttgggacagtcatctgtccatcagatgactcccagctcttcctacggtttgcagacttcccagggctatactccttatgtttctcatgtgggattgcagcaacacacaggccctgcaggtaccatggtgccccccagctactccagccagccttaccagagcacccacccttctaccaatcctactcttgtagatcctacccgccacctgcaacagcggcccagtggctatgtgcaccagcaggcccccacctatggacatggactgacctccactcaaaggttttcacaccagacactgcagcagacacccatgataagtaccatgactccaatgagtgcccagggcgtccaggcaggcgtccgttcaacagccatcctacctgagcagcagcagcagcagcaacagcagcaacagcaacagcagcagcagcagcaacagcaacagcagcagcagcagcagcagtaccacatccggcagcagcagcagcagcagatcctgcggcagcagcagcaacagcaacagcagcagcagcagcagcagcaacagcaacagcagcagcagcaacagcaacaacagcaacaccagcagcaacagcagcaacaggcggctcctccccaaccccagccccagtcccagccccagttccagcgccaggggcttcagcagacccagcagcagcaacagacagcagctttggtccggcaacttcaacaacagctctctaatacccagccacagcccagtaccaacatatttggacgctactgagccacctggaggaactgcttgtgcactggatgtggccccaccctttcctcttaattcccaatcccattcctgggctagcaccagtagtggttggggccctcccctcaggctccatttttaataagtttttagtatttttgttaatgtgaggcattgagctgttgggttttgtatattatttatatagagaccccagagctgttgcacccaatacacagagcttctttgc

SEQ ID NO: 160 - protein, 2124 aa, Homo sapiens
DEHGSAKNVSFNPAKISSNFSSIIAEKLRCNTLPDTGRRKPQVNQKDNFWLVTARSQSAINTWFTDLAGTKPLTQLAKKVPIFSKKEEVFGYLAKYTVPVMRAAWLIKMTCAYYAAISETKVKKRHVDPFMEWTQIITKYLWEQLQKMAEYYRPGPAGSGGCGSTIGPLPHDVEVAIRQWDYTEKLAMFMFQDGMLDRHEFLTWVLECFEKIRPGEDELLKLLLPLLLRYSGEFVQSAYLSRRLAYFCTRRLALQLDGVSSHSSHVISAQSTSTLPTTPAPQPPTSSTPSTPFSDLLMCPQHRPLVFGLSCILQTILLCCPSALVWHYSLTDSRIKTGSPLDHLPIAPSNLPMPEGNSAFTQQVRAKLREIEQQIKERGQAVEVRWSFDKCQEATAGFTIGRVLHTLEVLDSHSFERSDFSNSLDSLCNRIFGLGPSKDGHEISSDDDAVVSLLCEWAVSCKRSGRHRAMVVAKLLEKRQAEIEAERCGESEAADEKGSIASGSLSAPSAPIFQDVLLQFLDTQAPMLTDPRSESERVEFFNLVLLFCELIRHDVFSHNMYTCTLISRGDLAFGAPGPRPPSPFDDPADDPEHKEAEGSSSSKLEDPGLSESMDIDPSSSVLFEDMEKPDFSLFSPTMPCEGKGSPSPEKPDVEKEVKPPPKEKIEGTLGVLYDQPRHVQYATHFPIPQEESCSHECNQRLVVLFGVGKQRDDARHAIKKITKDILKVLNRKGTAETDQLAPIVPLNPGDLTFLGGEDGQKRRRNRPEAFPTAEDIFAKFQHLSHYDQHQVTAQVSRNVLEQITSFALGMSYHLPLVQHVQFIFDLMEYSLSISGLIDFAIQLLNELSVVEAELLLKSSDLVGSYTTSLCLCIVAVLRHYHACLILNQDQMAQVFEGLCGVVKHGMNRSDGSSAERCILAYLYDLYTSCSHLKNKFGELFSDFCSKVKNTIYCNVEPSESNMRWAPEFMIDTLENPAAHTFTYTGLGKSLSENPANRYSFVCNALMHVCVGHHDPDRVNDIAILCAELTGYCKSLSAEWLGVLKALCCSSNNGTCGFNDLLCNVDVSDLSFHDSLATFVAILIARQCLLLEDLIRCAAIPSLLNAACSEQDSEPGARLTCRILLHLFKTPQLNPCQSDGNKPTVGIRSSCDRHLLAASQNRIVDGAVFAVLKAVFVLGDAELKGSGFTVTGGTEELPEEEGGGGSGGRRQGGRNISVETASLDVYAKYVLRSICQQEWVGERCLKSLCEDSNDLQDPVLSSAQAQRLMQLICYPHRLLDNEDGENPQRQRIKRILQNLDQWTMRQSSLELQLMIKQTPNNEMNSLLENIAKATIEVFQRSAETGSSSGSTASNMPSSSKTKPVLSSLERSGVWLVAPLIAKLPTSVQGHVLKAAGEELEKGQHLGSSSRKERDRQKQKSMSLLSQQPFLSLVLTCLKGQDEQREGLLTSLYSQVHQIVNNWRDDQYLDDCKPKQLMHEALKLRLNLVGGMFDTVQRSTQQTTEWAMLLLEIIISGTVDMQSNNELFTTVLDMLSVLINGTLAADMSSISQGSMEENKRAYMNLAKKLQKELGERQSDSLEKVRQLLPLPKQTRDVITCEPQGSLIDTKGNKIAGFDSIFKKEGLQVSTKQKISPWDLFEGLKPSAPLSWGWFGTVRVDRRVARGEEQQRLLLYHTHLRPRPRAYYLEPLPLPPEDEEPPAPTLLEPEKKAPEPPKTDKPGAAPPSTEERKKKSTKGKKRSQPATKTEDYGMGPGRSGPYGVTVPPDLLHHPNPGSITHLNYRQGSIGLYTQNQPLPAGGPRVDPYRPVRLPMQKLPTRPTYPGVLPTTMTGVMGLEPSSYKTSVYRQQQPAVPQGQRLRQQLQQSQGMLGQSSVHQMTPSSSYGLQTSQGYTPYVSHVGLQQHTGPAGTMVPPSYSSQPYQSTHPSTNPTLVDPTRHLQQRPSGYVHQQAPTYGHGLTSTQRFSHQTLQQTPMISTMTPMSAQGVQAGVRSTAILPEQQQQQQQQQQQQQQQQQQQQQQQQQQYHIRQQQQQQILRQQQQQQQQQQQQQQQQQQQQQQQQQQHQQQQQQQAAPPQPQPQSQPQFQRQGLQQTQQQQQTAALVRQLQQQLSNTQPQPSTNIFGRY

SEQ ID NO: 161 - DNA, 5008 bp, Homo sapiens
  CDS (193)...(4938): DRIP205
cggacaggcgcacacgacgcctcgagcacccttctcttcttgccgccggggacttcagattgatccttcccgggaagagtagggactgctggtgccctgcgtcccgggatcccgagccaacttgtttcctccgttagtggtggggaagggcttatccttttgtggcggatctagcttctcctcgccttcaggatgaaagctcagggggaaaccgaggagtcagaaaagctgagtaagatgagttctctcctggaacggctccatgcaaaatttaaccaaaatagaccctggagtgaaaccattaagcttgtgcgtcaagtcatggagaagagggttgtgatgagttctggagggcatcaacatttggtcagctgtttggagacattgcagaaggctctcaaagtaacatctttaccagcaatgactgatcgtttggagtccatagcaagacagaatggactgggctctcatctcagtgccagtggcactgaatgttacatcacgtcagatatgttctatgtggaagtgcagttagatcctgcaggacagctttgtgatgtaaaagtggctcaccatggggagaatcctgtgagctgtccggagcttgtacagcagctaagggaaaaaaattttgatgaattttctaagcaccttaagggccttgttaatctgtataaccttccaggggacaacaaactgaagactaaaatgtacttggctctccaatccttagaacaagatctttctaaaatggcaattatgtactggaaagcaactaatgctggtcccttggataagattcttcatggaagtgttggctatctcacaccaaggagtgggggtcatttaatgaacctgaagtactatgtctctccttctgacctactggatgacaagactgcatctcccatcattttgcatgagaataatgtttctcgatctttgggcatgaatgcatcagtgacaattgaaggaacatctgctgtgtacaaactcccaattgcaccattaattatggggtcacatccagttgacaataaatggaccccttccttctcctcaatcaccagtgccaacagtgttgatcttcctgcctgtttcttcttgaaatttccccagccaatcccagtatctagagcatttgttcagaaactgcagaactgcacaggaattccattgtttgaaactcaaccaacttatgcacccctgtatgaactgatcactcagtttgagctatcaaaggaccctgaccccatacctttgaatcacaacatgagattttatgctgctcttcctggtcagcagcactgctatttcctcaacaaggatgctcctcttccagatggccgaagtctacagggaacccttgttagcaaaatcacctttcagcaccctggccgagttcctcttatcctaaatctgatcagacaccaagtggcctataacaccctcattggaagctgtgtcaaaagaactattctgaaagaagattctcctgggcttctccaatttgaagtgtgtcctctctcagagtctcgtttcagcgtatcttttcagcaccctgtgaatgactccctggtgtgtgtggtaatggatgtgcaggactcaacacatgtgagctgtaaactctacaaagggctgtcggatgcactgatctgcacagatgacttcattgccaaagttgttcaaagatgtatgtccatccctgtgacgatgagggctattcggaggaaagctgaaaccattcaagccgacaccccagcactgtccctcattgcagagacagttgaagacatggtgaaaaagaacctgcccccgctagcaggcccagggtatggcatgaccacaggcaacaacccaatgagtggtaccactacaccaaccaacacctttccggggggtcccattaccaccttgtttaatatgagcatgagcatcaaagatcggcatgagtcggtgggccatggggaggacttcagcaaggtgtctcagaacccaattcttaccagtttgttgcaaatcacagggaacggggggtctaccattggctcgagtccgacccctcctcatcacacgccgccacctgtctcttcgatggccggcaacaccaagaaccacccgatgctcatgaaccttcttaaagataatcctgcccaggatttctcaaccctttatggaagcagccctttagaaaggcagaactcctcttccggctcaccccgcatggaaatatgctcggggagcaacaagaccaagaaaaagaagtcatcaagattaccacctgagaaaccaaagcaccagactgaagatgactttcagagggagctattttcaatggatgttgactcacagaagcctatctttgatgtcaacatgacagctgacacactggatacgccacacatcactccagctccaagccagtgtagcactcccccaacaacttacccacaaccagtacctcacccccaacccagtattcaaaggatggtccgactatccagttcagacagcattggcccagatgtaactgacatcctttcagacattgcagaagaagcttctaaacttcccagcactagtgatgattgcccagccattggcacccctcttcgagattcttcaagctctgggcattctcagagtaccctgtttgactctgatgtctttcaaactaacaataatgaaaatccatacactgatccagctgatcttattgcagatgctgctggaagccccagtagtgactctcctaccaatcatttttttcatgatggagtagatttcaatcctgatttattgaacagccagagccaaagtggttttggagaagaatattttgatgaaagcagccaaagtggggataatgatgatttcaaaggatttgcatctcaggcactaaatactttgggggtgccaatgcttggaggtgataatggggagaccaagtttaagggcaataaccaagccgacacagttgatttcagtattatttcagtagccggcaaagctttagctcctgcagatcttatggagcatcacagtggtagtcagggtcctttactgaccactggggacttagggaaagaaaagactcaaaagagggtaaaggaaggcaatggcaccagtaatagtactctctcggggcccggattagacagcaaaccagggaagcgcagtcggaccccttctaatgatgggaaaagcaaagataagcctccaaagcggaagaaggcagacactgagggaaagtctccatctcatagttcttctaacagaccttttaccccacctaccagtacaggtggatctaaatcgccaggcagtgcaggaagatctcagactcccccaggtgttgccacaccacccattcccaaaatcactattcagattcctaagggaacagtgatggtgggcaagccttcctctcacagtcagtataccagcagtggttctgtgtcttcctcaggcagcaaaagccaccatagccattcttcctcctcttcctcatctgcttccacctcagggaagatgaaaagcagtaaatcagaaggttcatcaagttccaagttaagtagcagtatgtattctagccaggggtcttctggatctagccagtccaaaaattcatcccagtctggggggaagccaggctcctctcccataaccaagcatggactgagcagtggctctagcagcaccaagatgaaacctcaaggaaagccatcatcacttatgaatccttctttaagtaaaccaaacatatccccttctcattcaaggccacctggaggctctgacaagcttgcctctccaatgaagcctgttcctggaactcctccatcctctaaagccaagtcccctatcagttcaggttctggtggttctcatatgtctggaactagttcaagctctggcatgaagtcatcttcagggttaggatcctcaggctcgttgtcccagaaaactcccccatcatctaattcctgtacggcatcttcctcctccttttcctcaagtggctcttccatgtcatcctctcagaaccagcatgggagttctaaaggaaaatctcccagcagaaacaagaagccgtccttgacagctgtcatagataaactgaagcatggggttgtcaccagtggccctgggggtgaagacccactggacggccagatgggggtgagcacaaattcttccagccatcctatgtcctccaaacataacatgtcaggaggagagtttcagggcaagcgtgagaaaagtgataaagacaaatcaaaggtttccacctccgggagttcagtggattcttctaagaagacctcagagtcaaaaaatgtggggagcacaagtgtggcaaaaattatcatcagtaagcatgatggaggctcccctagcattaaagccaaagtgactttgcagaaacctggggaaagtagtggagaagggcttaggcctcaaatggcttcttctaaaaactatggctctccactcatcagtggttccactccaaagcatgagcgtggctctcccagccatagtaagtcaccagcatataccccccagaatctggacagtgaaagtgagtcaggctcctccatagcagagaaatcttatcagaatagtcccagctcagacgatggtatccgaccacttccagaatacagcacagagaaacataagaagcacaaaaaggaaaagaagaaagtaaaagacaaagatagggaccgagaccgggacaaagaccgagacaagaaaaaatctcatagcatcaagccagagagttggtccaaatcacccatctcttcagaccagtccttgtctatgacaagtaacacaatcttatctgcagacagaccctcaaggctcagcccagactttatgattggggaggaagatgatgatcttatggatgtggccctgattgggaattaggaaccttatttcctaaaagaaacagggccagaggaaaaaaaactattgataagtttataggcaaaccacc

SEQ ID NO: 162 - protein, 1581 aa, Homo sapiens [sequence omitted]

SEQ ID NO: 163 - DNA, 7984 bp, Homo sapiens
  CDS (120)...(4484): DRIP150
cggcccggcggtaggcggtggcgactctgcccgctcccgtttcggcgcggtgaccgagcgcccgggaggctcgaggaccgcatcgtgtgccgttgcgccaagcccggtcctgcgccgccatggccccagtgcagctggagaaccaccagctggtcccgcccggaggcggcggcgggggcagcggcggacccccgtcagccccagcccctcctcccccgggagccgccgtggcggcggccgctgcagctgcggctagcccgggctaccggctgagcaccctcattgaatttctgctgcaccgggcctactcggagcttatggtgttgacggacctactgccaaggaaatctgatgtggaaaggaaaatagaaatagtgcagtttgctagccggacacgccaactcttcgttcgattattagctttagtgaaatgggctaataatgctggcaaagtggaaaaatgtgcgatgatttcaagctttttagatcagcaagccatcctgtttgtggacactgctgatcgcctggcctcgttagctagagatgctctggtccatgcacgcctgcctagttttgccatcccatatgccattgatgtactaactactggatcttacccacggctgccaacctgcattagggataaaattattcctccagacccaattaccaaaattgaaaaacaagccacactccatcagctgaatcagattcttagacatcggcttgtaaccacagatcttcctcctcagttagcaaatcttacagttgcaaatggccgggtgaagtttcgtgttgaaggagaatttgaagccaccttgactgtgatgggagatgaccctgatgttccatggcgtcttctcaagctagaaattctagttgaggataaggaaacaggagatgggcgagctttggttcatagcatgcaaatcagcttcatccatcaactggtgcagtctaggctctttgctgatgagaaacctcttcaggatatgtacaactgcctacattctttctgtttatcacttcagttagaagtgttacattcccaaactctaatgttaatccgagaacggtggggagaccttgtgcaggtggaaaggtatcatgctggaaagtgcctctccctttcagtttggaatcaacaggttcttgggagaaaaactggaacagcatctgttcacaaagttacaattaaaattgatgagaatgatgtctccaagcctttacagatttttcacgatcctcctttgccagcttctgattccaaattagtagaaagagccatgaagatcgaccacttatcaatagaaaaactcctgattgacagtgtccatgcaagagctcatcagaagctccaagaactgaaggccattcttagaggcttcaatgccaatgaaaactcttccatagagactgcactcccagctcttgttgttcccatcttggagccctgtggtaattcagagtgtctgcacatttttgtagatttacattctggaatgtttcaattgatgctttatggacttgaccaggccactctggatgacatggagaagtctgtgaatgatgatatgaaacgaatcataccctggattcagcaacttaagttttggcttggacaacagcgttgcaagcagtctataaaacatctgcctacgataagcagtgaaacattgcagctttccaattactcaactcatcctattggaaacctttctaagaataaactgttcattaaacttacccgccttccacaatactacattgttgtggagatgttggaggttcccaataaacccacacaactgtcgtacaagtactactttatgtctgtgaatgctgcagatcgtgaagacagccctgcaatggcattgctgctgcagcagttcaaggaaaacattcaggacttggtttttcgtacaaaaaccgggaaacagaccagaaccaatgccaagcgcaagttgtctgatgatccatgtccagtagaatccaagaaaacaaaacgagcaggagaaatgtgtgccttcaataaagttttagcccacttcgtcgctatgtgtgatacaaatatgccatttgtaggacttcggttggagttgtccaatctggagattccacatcaaggagtgcaagtggaaggtgatggcttcagccatgcaattcgcttattaaaaattcctccctgtaagggtataactgaggaaacccaaaaggctctggaccgctctcttcttgattgcactttccgattacaaggtagaaataaccgcacttgggtagcagagttagtgtttgcaaattgtccacttaatggcacttctactagggagcaaggaccatcccggcacgtttacctgacatatgaaaatctgttgtctgagcctgttggtggtagaaaggtggttgaaatgtttcttaatgactggaatagcattgcacgattatatgagtgtgtgttggaatttgcacgttctctaccagacatacctgctcatctaaatattttctcagaagttcgtgtttataattaccgaaaacttatcttgtgttatggaaccaccaagggaagctcaattagtatccaatggaattcgatccatcaaaaattccacatttctttgggaactgttggcccaaactcaggttgcagtaactgtcacaataccattctccatcagcttcaagaaatgttcaacaaaacaccaaatgtggttcagttattacaggtactgtttgatactcaggctccattaaatgccatcaacaaactccccactgtgccgatgttgggcttgacccagagaaccaatactgcctaccagtgcttctccattctgccacagtcgtccacccacatcagactggccttcaggaacatgtattgcattgatatatactgccggagtcgaggtgttgtggcaatacgggatggtgcctatagtctttttgataacagcaaactagttgaaggtttctatcctgcaccaggactaaagacgttcctgaatatgtttgttgacagcaatcaggatgctcgaagaaggtctgtaaatgaggacgataatcccccttctcctataggaggagatatgatggattctttaatatcgcagctccagccaccaccccagcaacagccatttccaaagcagccaggaacatcaggtgcttatcctcttacttcaccccctacatcttatcatagcacagtcaatcagtctccctcaatgatgcacacacagtctccaggaaatctgcatgctgccagctcccccagtggggctttgagagccccatcaccagcgtcatttgttccaactcctcccccatcctcgcatggaatctcaataggaccaggggccagttttgctagtccacatggaactcttgaccctagttccccatacactatggtgtcaccaagtggacgagcagggaactggccaggatctcctcaagtgtctggcccctcaccagcagcacgcatgcctggaatgtcaccagccaacccctcactacattctccggttccagatgcttctcattcccctcgagctggaacaagttctcaaacaatgccaacaaacatgcctccacctcgtaaactacctcagcgctcttgggcggcatccatacctaccatcctcactcacagtgccttgaacattttactgctgccctctccaactccaggccttgtgcccggcctggcaggtagttacctttgttctccacttgagagattccttggatcagtcatcatgagacgacatcttcaaagaattattcaacaagaaacgctgcagctgataaattctaatgaacccggagtgatcatgtttaagactgatgcactgaaatgcagagtagctcttagtcccaaaaccaaccaaacgcttcagctaaaattgacacctgaaaatgcaggacagtggaaacctgatgaacttcaagttttggagaaattctttgaaacaagagttgcaggaccaccatttaaagctaatacgttaatagccttcaccaagctattaggagctcctacacacatcctcagggattgtgtgcacattatgaagctggagctgttccctgaccaagcaacacagctaaaatggaatgttcagttttgcctgacgatccctcccagcgcgccgccgattgcacctcctgggacgcctgctgtggtgctgaaatccaaaatgctattttttcttcaactaactcagaaaacatcggtccctccccaagaacctgttagtattatagttccaatcatttatgacatggcttcaggtacaacccagcaggcagacattcccagacagcagaactcttctgttgctgctcccatgatggtcagcaacattctgaagaggtttgcagagatgaatccaccacgacaaggtgaatgcacaatatttgcagctgttcgtgatttaatggctaatcttacactgccccctgttgggcgtccatagacactattgtttttaaaccaggaaggctgacagatgagacaacaaaaaaaatctgaattcagccttcagtttaaaaaaggaaaaggactttttttttaaactttaagagctaaatattctaaactggcaaaaattttcagggtgcacttctttcatcaaaatgatcatccatcttttgtataatgaacttgtatagtgtgtttaaatgggacacatttcaaaggaaataaatcagtgtccgtttgccagtaataaatttaatattctgttttatactataaagttatgaaaatgccaaacttgtttatttaattgttttcttatgttttgggtgtaatagtccttttttggtttttgttttgttttttaaggcaggtctgtcatttttgaatactgtaaaactgtgataaactttatattgaagctgtattttaatatgaccgctttgaatccttacatgaaatgttctgggagttgttataaacacaccccaaggaagcaatatttaataaaactaggtcaaaaacaaaacaaaacagtgacactcacttgtgtgtatataaactctagagacatcttaggccctcccttcatctttaacctggtggatggagccagttattaatttataataatacatgtctgaaatttgaccaaaaacatcttctttatgtcaaggttaatatattttcttcagacattcctaacttgactagtggttaacatttagcaccttggttgtctttcaatatataggatttgggtgaaaaataaggaacttagtctttgagaagggacagtatgtggttcgtattgatcaaggatcccaaataatgcaatcattctcatctgttgaggatgtgggaacttttctgtcaggaaaatttagtttacagaatacttctgcatacaacattaattaggaaacaaagaactttaatgctgtacctctgcatgaagtttctgtgagctttctttatcttgcttaacttatcctcctttccttccccaccaaaattgggattgttctaaacaatttcaatttaattcattgtcaacaaaacgatagaatgttttgcttggaagaaacctggtccattcccctcattgtgaagaatcccgaatcctgggcctgtccagggtcaaatggagtttttggtattaatacatctctgcagggtttctttttggagcactgtgctgtctttcctagtcagtcagggacttttttaagcttcaaagaacatggtctgatgcaaaggtcttctaccgacttcatggtatttaggaaaaatttttaagtgataataccatgccgagttacctggtcactgtaatactggttctccattaaaatgtagatgctttgtctaattccacttcaagatgatttaattgagcttctataactatcaactatcaaattctagtttcaagtatctcactgtacctatatcatatctgttctcaactttgtttgattctccactcattttcaatcagagttgaagccttctttgcctttcttctttgtcttatttctgccttcatctcccacttctcacccaactctgccactgttcaggagcagttgactaaacttttatccttcctttaacttaatctttttatccttctgtttttagttcttacagtggtaatcacatcagtttggcaatctaagatgtctttatcaagggtcagcccttttctatttggagctgaatcttttctttcatgtagaaatctacatgtatatacaagaaatgtatttttatctgcaggataatattgtttcaaataattttattaagagttaactttttaggtattttcccttttaatgtggttttgaaatgttaattgcatttttacacatgatgcattcagtggacactcttttttcctaattataactcatctctgaatgcattgtgccaatcaagagtaagataggattcagtgcgcaaaatttgcttttgatgcttattaagagtaaacccatgaatttgaatttttatattatgcttggtacttggaattgatatataccttattaaagcttgaaaacatttagcatttgaatagtaagtttcatcacaaatcatgtcttttgcctcttttgttacccaggttcgatcaaggggactggatgcccaagtgattttctctaataatcgggttgggacttaactttaaggtgttttcaatgtgattttagtatttacagtaataaataaaatttatacaaagtttcagagaactaccaactctctagttaattttgatgaagatgttttcattaatagtctggtttagtattaatttaaccttgaaataagaaattggtcctgatttgccaccttcatttttccatctgctgaaatgccatttcagaatgtataaaagtactttcagaattagaagaaaagtgagagcttcagcagaacgtgtcaagtcgctaataacaggagtcgaaccttatgtttgaaaattaactgagtgagttaagtgcaagcataaactaaaatttatatgactttgaatttaagaaccactaataactgtgttctaattaacacagtaatctgttcagccaaaggatactaacagccattctttggactgtggttaatttgataacttcaagaagttataactttgctaccctggattctgatgcaatttcaatataaaaagttgttcctttcatagtttttccccccaaaagaagtgcctattacattttaccttaatgtttatttatcatccaagtgttcttgatataaaatcagtatacagaaaattttaagagaacttacattcaagggacatagagggaaaatgttaatgtgtatttcattgtttcttgtggaatttttttttcattcggtttgagaatggacagtgtgtctaaggatgtgatttaaatttacttaggatggatttagcattgaggttattaagacaaagttagcagaggccagccagcactgtgctgcacaactccaggaactccatggtatgctcacaattttctgcaagttgcctccacttccaagtggccagtgatttgttaaaataccttgcccaagaatataactgattgatgaaagggcatatttaggtcaatataaaataatagcaagtatttactgagagcttactgtgtgctaggcattttcttaatatttcaatgtgtatttaatcctcacaacaacccaatgtggtaggttattgatatcctcttcttaaaaatgagtaaatggaggcccagagaaatgtaatttgcctgagatcaaattaaggttgcttaagatcaaactgctaagaaggggcagtttgagtctgagctagtgctcctaaacactggacatttttgctgtgaaccacagtcgggaaggtttaatgtttagactctttcctcagaggcttttaactacacacaattttgacatgttttccaagctcagaaagctcattaaaaacaactaaaactg

SEQ ID NO: 164 - protein, 1454 aa, Homo sapiens [sequence omitted]

SEQ ID NO: 165 - DNA, 5176 bp, Homo sapiens
  CDS (120)...(4226): DRIP130
gaattcggcacgagacggtttcctccagaggtctccgcccctctgcccctatattcccagagctcgagtctgatccgggccttgccgggcaccctggaaaggcgggggtgatagtacagatggagacgcaactgcagagcattttcgaagaggtggtgaaaacggaagttatagaagaggcttttcctggcatgtttatggatactcctgaagatgagaaaacaaaactaattagctgtttgggggccttcagacagttttggggtggtctttctcaggagtctcatgaacagtgtatccagtggattgttaagtttattcatggtcagcatagtcctaaaagaatttcttttctttatgactgcttagcaatggcagttgagactggtctccttccacccaggctggtttgtgaatccctgataaactctgacactcttgagtgggaaagaacacagctttgggccttaacatttaaactggttcggaaaataattgggggagtggataacaagggtgttcgagatctcttaaaagtgattttggagaagattttgacaattcctaatacagtgagctctgctgttgtacagcagcttctggcagcaagagaggttatagcatatatcttggaaagaaatgcctgcttattaccagcctattttgcagtcactgagatcaggaaactgtatcctgaaggcaaacttccacactggttacttggaaacctagtatcagactttgtggataccttcaggcccacagcaaggataaactccatttgtggtcgctgtagtcttctgccagttgtaaataattcgggtgccatttgtaattcatggaaactggatcctgctactcttcgttttcctttgaaaggccttttgccatatgataaggatctgtttgaaccacagactgctttgttgagatatgtattggagcagccttattccagggatatggtctgcaatatgctaggtttaaataagcagcacaagcagcgctgccctgtgctggaggaccagttggtggatctggttgtttatgccatggagcgatctgagaccgaggagaagtttgacgatgggggaacaagccaactcctgtggcagcatctctcaagtcagctcattttctttgtgcttttccagtttgcaagttttccacatatggtgctttctcttcatcagaagttagcagggcgaggactgattaaaggcagagatcatcttatgtgggttctcctgcaattcatttctggaagtattcagaaaaatgcactagctgattttctccctgtgatgaagctcttcgacttgctatacccagaaaaagaatatatcccagttcctgatattaacaaaccccagtcaacccatgcctttgcaatgacctgtatttggattcatctcaatagaaaagctcaaaatgacaactccaagctacagattccaatacctcattccctaagacttcaccatgagttcctgcagcagagtctaagaaataaaagtttacagatgaatgactataagattgctctattgtgtaatgcatactctacaaattcagaatgttttacattacccatgggagctctggtagaaactatttatggaaatggaattatgaggatacctctccctggaacaaactgtatggcttcaggatctattacccccttacctatgaacctcctggattcactgacagttcatgccaaaatgagccttattcacagcattgcaaccagggtgataaaacttgctcatgcaaagtccagtgtggccttggctccagccctagtggaaacttacagtcgtttattggtctatatggaaatagagtctttgggcatcaaaggatttatcagtcagcttttgccaactgttttcaaatcacatgcatgggggatcttacacacactccttgagatgtttagctaccggatgcatcatattcagcctcattacagagttcagctcctgagtcatcttcatactttggctgcagttgcacaaacaaaccagaaccagctccatctttgtgtcgagagcactgctctcaggcttataacagcattaggtagctcagaggtacaaccgcagtttacacgcttccttagtgatcccaaaacagtgctctcagcagaatctgaagaactgaaccgagccttgatattgaccttggctagagcaactcatgtaacagatttttttacaggctctgattcaattcagggaacttggtgtaaagacatacttcagaccatcatgagtttcactcctcataattgggcttcacacaccctgagctgttttccaggcccactacaggcattcttcaaacaaaataatgtgcctcaggaaagccgttttaatctgaaaaaaaatgtggaggaggagtataggaagtggaagtcaatgagcaacgaaaacgacattattacccacttctctatgcagggctcccctcctctctttctttgtcttctctggaaaatgctcttggaaacagatcatattaatcagattggctatagagtattagagagaattggagccagggccttggtagcccatgtgaggacatttgcagatttcctggtatatgagttttctacatcagcagggggtcagcaactcaataaatgcattgaaattcttaatgacatggtatggaagtataacattgttacactggacagattaattctctgcctggccatgcgtagtcacgaaggaaatgaagcccaggtttgttatttcataattcagttgctgttactcaaaccaaacgattttagaaatcgagtaagtgactttgtgaaggaaaattccccagagcactggttacagaatgactggcacaccaagcacatgaattatcacaagaaatatccagagaagttgtattttgagggcctcgcggaacaggtggatcctccctgtacagatccagtctcctatctgcccatctattttgggaatgtgtgtcttcgattccttccagtatttgatatagtaatccacagatttttagagttgcttccggtatccaaatcactggagactctactggatcatctaggaggcttatataaatttcatgatcgtccagtgacttatctgtataacactctgcactattatgaaatgcacctgagagaccgcgcatttctcaaacgaaaactcgtccatgcgatcattggctctctgaaggataatcgaccgcagggctggtgtctaagtgacacttacctgaaatgcgctatgaatgcacgagaggaaaatccttgggttccagatgacacctactattgcagattgattggcagactagtcgatacgatggctggcaaatctcctggtccctttccaaactgtgactggagattcaatgagtttcccaacccagctgcccatgctctccatgttacttgtgtggagctcatggccttggcagtttcaggcaaagaagttgggaatgcccttctaaatgttgtcctaaaaagtcagcctttagtgccaagagagaacattacagcatggatgaatgcaattggtttgatcatcactgccctaccagagccatattggattgttcttcatgatcgaattgtgagtgtcatcagcagccccagcttgacgtctgaaacagagtgggttggctatccattccgcctctttgatttcactgcctgtcatcagtcgtactctgagatgagttgtagctatacgttagctcttgcacatgctgtgtggcaccattctagcatcggacaactttctctcattccaaagtttcttactgaagtacttcttcctatagtgaagaccgaattccagttgctttatgtataccatcttgttggaccatttttacaaagatttcagcaagagagaactcgttgtatgatagagattggtgtggcgttttatgacatgctgctgaatgttgaccagtgtagcacccatttaaattacatggatcccatctgtgacttcctctatcacatgaagtatatgtttactggtgacagcgtgaaagagcaagtagagaagattatctgtaacttaaaaccagctttaaaacttcgtcttcgattcatcacacacattagcaagatggagccagctgcagtgcctccacaagccatgaacagtgggtctccagcacctcagtctaatcaggtgcccgtgtctttaccagtaactcagtgaaagccagactgtactgtggagaaagtagaaatatatccgtctttgagagtggactcaaaccttttaaatctgaatgcgatcacactgtagtgatatagtagaagcagtgatgatattcagattgttttattttgattcaaatgatgaatctgttgacaccttataactcccatctccctatctatatttttgtctctaagagatcaagtaagatacatgttgttcatattcataacaacttattagagctatgtaggaacatagaggtatctgtgatcaaatgacttgtcattggcactttcagtctttcctattctagccgttgtttttgtttgtattttttattattaatgacatatttagtcttcagatatattattttaaaggcaccacacatgtaaaacagttattacaaatattttatacataaatctcttggtagattttcagaataatagagatttatatcaagaaaaggaatctagattttgttgcattgtaggagcaaacaaggcttcatattctttttaaaatgacttgaaattttattataaatttccatagtttctatcaaggtcaactggcagttttattacctttgctatggacttgaacttactgtataaaattagttggaagccatgtaagaaaataacatctgaaaattcttgaacttaaaatcatgcttaaatggttgattctccaatttctttttttaaaaataagttaattgcttttgcaggttgacactctcacctgacagatgatgtaattcttcaatttttataatcttaaaatttttaaattttatatttgtaaatacagtacacattttatttcttggattttgagagacattgttaattttgggggaattggcattgcgaaagacttgaaaactaatgagtaaagtctgctgaatgaataaaaaaaaaaaaaaaaaactcgag

SEQ ID NO: 166 - protein, 1368 aa, Homo sapiens
METQLQSIFEEVVKTEVIEEAFPGMFMDTPEDEKTKLISCLGAFRQFWGGLSQESHEQCIQWIVKFIHGQHSPKRISFLYDCLAMAVETGLLPPRLVCESLINSDTLEWERTQLWALTFKLVRKIIGGVDNKGVRDLLKVILEKILTIPNTVSSAVVQQLLAAREVIAYILERNACLLPAYFAVTEIRKLYPEGKLPHWLLGNLVSDFVDTFRPTARINSICGRCSLLPVVNNSGAICNSWKLDPATLRFPLKGLLPYDKDLFEPQTALLRYVLEQPYSRDMVCNMLGLNKQHKQRCPVLEDQLVDLVVYAMERSETEEKFDDGGTSQLLWQHLSSQLIFFVLFQFASFPHMVLSLHQKLAGRGLIKGRDHLMWVLLQFISGSIQKNALADFLPVMKLFDLLYPEKEYIPVPDINKPQSTHAFAMTCIWIHLNRKAQNDNSKLQIPIPHSLRLHHEFLQQSLRNKSLQMNDYKIALLCNAYSTNSECFTLPMGALVETIYGNGIMRIPLPGTNCMASGSITPLPMNLLDSLTVHAKMSLIHSIATRVIKLAHAKSSVALAPALVETYSRLLVYMEIESLGIKGFISQLLPTVFKSHAWGILHTLLEMFSYRMHHIQPHYRVQLLSHLHTLAAVAQTNQNQLHLCVESTALRLITALGSSEVQPQFTRFLSDPKTVLSAESEELNRALILTLARATHVTDFFTGSDSIQGTWCKDILQTIMSFTPHNWASHTLSCFPGPLQAFFKQNNVPQESRFNLKKNVEEEYRKWKSMSNENDIITHFSMQGSPPLFLCLLWKMLLETDHINQIGYRVLERIGARALVAHVRTFADFLVYEFSTSAGGQQLNKCIEILNDMVWKYNIVTLDRLILCLAMRSHEGNEAQVCYFIIQLLLLKPNDFRNRVSDFVKENSPEHWLQNDWHTKHMNYHKKYPEKLYFEGLAEQVDPPCTDPVSYLPIYFGNVCLRFLPVFDIVIHRFLELLPVSKSLETLLDHLGGLYKFHDRPVTYLYNTLHYYEMHLRDRAFLKRKLVHAIIGSLKDNRPQGWCLSDTYLKCAMNAREENPWVPDDTYYCRLIGRLVDTMAGKSPGPFPNCDWRFNEFPNPAAHALHVTCVELMALAVSGKEVGNALLNVVLKSQPLVPRENITAWMNAIGLIITALPEPYWIVLHDRIVSVISSPSLTSETEWVGYPFRLFDFTACHQSYSEMSCSYTLALAHAVWHHSSIGQLSLIPKFLTEVLLPIVKTEFQLLYVYHLVGPFLQRFQQERTRCMIEIGVAFYDMLLNVDQCSTHLNYMDPICDFLYHMKYMFTGDSVKEQVEKIICNLKPALKLRLRFITHISKMEPAAVPPQAMNSGSPAPQSNQVPVSLPVTQ

SEQ ID NO: 167 - DNA, 3712 bp, Homo sapiens
  CDS (276)...(3245): DRIP100
caggtgcgagccactgcgctcggccgatactttcttagtgccccagtttaaggaagggcggttcaggagcagagagtctgacaggatcttactttatccctttagctctttttctttcaaattcctctgtctcgcttaaatcttcccgcatcttctcctttctatttaattctgccttccccggttctccttagaacctcatgtccttttctttagctccatttctttcacctcaaagctggccgccaccgctgccacctgctcagagtgaaataatgaaggtggtcaacctgaagcaagccattttgcaagcctggaaggagcgctggagtgactaccaatgggcaatcaacatgaagaaattctttcctaaaggagccacctgggatattctcaacctggcagatgcgttactagagcaggccatgattggaccatcccccaatcctctcatcttgtcctacctgaagtatgccattagttcccagatggtgtcctactcttctgtcctcacagccatcagtaagtttgatgacttttctcgggacctgtgtgtccaggcattgctggacatcatggacatgttttgtgaccgtctgagctgtcacggcaaagcagaggaatgcatcggactgtgccgagcccttcttagcgccctccactggctgctgcgctgcacggcagcctctgcagagcggctgcgggaggggctggaggccggcactccagccgctggggagaagcagcttgccatgtgccttcagcgcctggagaaaaccctcagcagcaccaagaaccgggccctgctgcacatcgccaaactagaggaggcctcttcttggactgccatcgagcattctctcttgaaacttggagagatcctggccaatctcagcaacccgcagctccggagtcaggccgagcagtgtggcaccctcattaggagcatccccacgatgctgtctgtgcatgcggagcagatgcacaagaccggcttccccactgtccacgccgtgatcctgctcgagggcaccatgaacctgacaggcgagacgcagtccctggtggagcagctgacgatggtgaagcgcatgcagcatatccccaccccactttttgtcctggagatctggaaagcttgcttcgtggggctcattgagtctcccgagggtacggaggagctcaagtggacagctttcactttcctcaagattccacaggttttggtgaagttgaagaagtactctcatggagacaaggacttcactgaggatgtcaactgtgcttttgagttcctgctgaagctcacccccttgttggacaaagctgaccagcgctgcaactgtgactgtacaaacttcctgctccaagaatgtggcaagcaggggcttctgtctgaggccagcgtcaacaaccttatggctaagcgcaaagcagaccgagagcacgcaccccagcagaaatcgggagagaatgccaacatccagcccaacatccagctgatcctccgggcggagcccactgtcacaaacatcctcaagacgatggatgcagaccactctaagtcaccggagggactgctgggagtcctgggccacatgctgtccgggaagagtctggacttgctgctggctgccgccgccgccactggaaagctgaaatccttcgcccggaaattcatcaatttgaatgaattcacaacctatggcagcgaagaaagcaccaaaccggcctccgtccgggccctgctgtttgacatctccttcctcatgctgtgccatgtggcccagacctatggttcagaggtgattctgtccgagtcgcgcacaggagctgaggtgcccttcttcgagacctggatgcagacctgcatgcctgaggagggcaagatcctgaaccctgaccacccctgcttccgccccgactccaccaaagtggagtccctggtggccctgctcaacaactcctcggagatgaagctagtgcagatgaagtggcatgaggcctgtctcagcatctcagccgccatcttggaaatcctcaatgcctgggagaatggggtcctggccttcgagtccatccagaaaatcactgataacatcaaagggaaggtatgcagtctggcggtgtgtgctgtggcttggcttgtggcccacgtccggatgctggggctggatgagcgtgagaagtcgctgcagatgatccgccagctggcagggccactgtttagtgagaacaccctgcagttctacaatgagagggtggtgatcatgaactcgatcctggagcgcatgtgtgccgacgtgctgcagcagacagccacgcagatcaagtttccctccaccggggtggacacaatgccctactggaacctgctgccccccaagcggcccatcaaagaggtgctgacggacatttttgccaaggtgctggagaagggctgggtggacagccgctccatccacatctttgacaccctgctgcacatgggcggcgtctactggttctgcaacaacctgattaaggagctgctgaaggagacgcggaaggagcacacgctgcgggcagtggagctgctctactccatcttctgcctggacatgcagcaagtgaccctggtcctgctgggccacatcctacctggcctgctcactgactcctccaagtggcacagcctcatggaccccccgggcactgctcttgccaagctggccgtgtggtgtgccctcagttcctactcctcccacaagggacaggcgtccacccgccagaagaagagacaccgcgaagacattgaggattatatcagcctcttccccctggacgatgtgcagccttcgaagttgatgcgactgctgagctctaatgaggacgatgccaacatcctttcgagccccacagaccgatccatgagcagctccctctcagcctctcagctccacacggtcaacatgcgggaccctctgaaccgagtcctggccaacctgttcctgctcatctcctccatcctggggtctcgcaccgctggcccccacacccagttcgtgcagtggttcatggaggagtgtgtggactgcctggagcagggtggccgtggcagcgtcctgcagttcatgcccttcaccaccgtgtcggaactggtgaaggtgtcagccatgtctagccccaaggtggttctggccatcacggacctcagcctgcccctgggccgccaggtggctgctaaagccattgctgcactctgaggggcttggcatggccgcagtgggggctggggactggcgcagccccaggcgcctccaagggaagcagtgaggaaagatgaggcatcgtgcctcacatccgctccacatggtgcaagagcctctagcggcttccagttccccgctcctgactcctgacctccaggatgtctcccggttttttttttcaaaatttcctctccatctgctggcccctgaggagagtgagcagcctggaccacaagcccagtggtcacccctgtgtgcgcccgccccagcccaggagtagtcttacctctgaggaactttttagatgcaaagtgtgtatgtgtgtgtgtgtgtgtgtgtgtgtgtgtttgtgtgtattttgtaatatgtgagggaaatctaccttcgttcatgtataaataaagctcctcgtggctccctttgtgaaaaaaaaaaaaaaaaaaaaaaaaaaaaaaaaaaaa

SEQ ID NO: 168 - protein, 989 aa, Homo sapiens
MKVVNLKQAILQAWKERWSDYQWAINMKKFFPKGATWDILNLADALLEQAMIGPSPNPLILSYLKYAISSQMVSYSSVLTAISKFDDFSRDLCVQALLDIMDMFCDRLSCHGKAEECIGLCRALLSALHWLLRCTAASAERLREGLEAGTPAAGEKQLAMCLQRLEKTLSSTKNRALLHIAKLEEASSWTAIEHSLLKLGEILANLSNPQLRSQAEQCGTLIRSIPTMLSVHAEQMHKTGFPTVHAVILLEGTMNLTGETQSLVEQLTMVKRMQHIPTPLFVLEIWKACFVGLIESPEGTEELKWTAFTFLKIPQVLVKLKKYSHGDKDFTEDVNCAFEFLLKLTPLLDKADQRCNCDCTNFLLQECGKQGLLSEASVNNLMAKRKADREHAPQQKSGENANIQPNIQLILRAEPTVTNILKTMDADHSKSPEGLLGVLGHMLSGKSLDLLLAAAAATGKLKSFARKFINLNEFTTYGSEESTKPASVRALLFDISFLMLCHVAQTYGSEVILSESRTGAEVPFFETWMQTCMPEEGKILNPDHPCFRPDSTKVESLVALLNNSSEMKLVQMKWHEACLSISAAILEILNAWENGVLAFESIQKITDNIKGKVCSLAVCAVAWLVAHVRMLGLDEREKSLQMIRQLAGPLFSENTLQFYNERVVIMNSILERMCADVLQQTATQIKFPSTGVDTMPYWNLLPPKRPIKEVLTDIFAKVLEKGWVDSRSIHIFDTLLHMGGVYWFCNNLIKELLKETRKEHTLRAVELLYSIFCLDMQQVTLVLLGHILPGLLTDSSKWHSLMDPPGTALAKLAVWCALSSYSSHKGQASTRQKKRHREDIEDYISLFPLDDVQPSKLMRLLSSNEDDANILSSPTDRSMSSSLSASQLHTVNMRDPLNRVLANLFLLISSILGSRTAGPHTQFVQWFMEECVDCLEQGGRGSVLQFMPFTTVSELVKVSAMSSPKVVLAITDLSLPLGRQVAAKAIAAL

SEQ ID NO: 169 - DNA, 3220 bp, Homo sapiens
  CDS (139)...(2760): DRIP92
cacgaggccccacgcctcaggcaactggttgttaccgaggaagatggcggcgccagacccgaggcgctagggaagatcgcaccgcggacgcccgctgagcttggcgcacgggccgaccaggagctggtgactgccctcatgtgtgatttgcggcggccagcggcaggtgggatgatggacttggcctacgtctgtgagtgggagaaatggtccaagagcacccactgcccatcggtgcccctggcctgcgcctggtcctgccgaaatctcatcgccttcaccatggacctgcgcagcgatgaccaggacctgacccgcatgatccacatcctggacacggagcacccctgggacctgcactcgatcccctcagagcaccacgaagccatcacctgcctggagtgggaccagtcaggctcccggctcctgtcagcagatgccgacgggcagatcaagtgctggagcatggcggaccacctggctaatagctgggagagctcagtgggcagcctagtggagggggaccccattgtggccctgtcctggctgcacaatggtgtgaaactggccctgcacgtggagaagtcgggcgcctccagcttcggggagaagttctcccgagtcaagttctcaccgtcgctcacgctgttcggcggcaagcccatggagggctggatcgcggtgacggtcagcggcctggtcaccgtgtccctgctgaagcccagcgggcaggtgctgacgtccaccgagagcctgtgccggctgcgcgcccgcgtggccctggccgacatcgccttcaccggcggcggcaacatcgtggtggccacggcggacggcagcagcgcgtcgcccgtgcagttctacaaggtgtgcgtgagcgtggtgagcgagaagtgccgtatcgacacggagatcctgccctccctgttcatgcgctgcaccaccgacctcaaccgcaaggacaagtttcccgccatcacccacctcaagttcctggcccgggacatgtcggagcaggtgcttttgtgcgcgtccagccagaccagcagcatcgtggagtgctggtccctgcgcaaggagggactccccgtgaacaacatcttccagcagatctcccccgtggttggcgacaaacagcccacaattctcaaatggcggatcctatcggccaccaacgatctggaccgtgtgtcggccgtggcgctgcccaagctgcccatttcgctcaccaacaccgacctcaaggtggccagcgacacacagttctaccctggcctcgggctggccctggccttccacgacggcagcgtccacatcgtgcaccggctctcactgcagaccatggcggtcttctacagctccgcggccccgaggcctgtggatgagccggccatgaagcgcccccgcaccgcgggccccgccgtccacttaaaggctatgcagctatcgtggacgtcactggccctggtggggattgacagccacgggaagctgagcgtgctccgcctctcaccttccatgggccacccgctggaggtggggctggcgctgcggcacctgctcttcctgctggagtactgcatggtgaccggctacgactggtgggacatcctgctgcacgtgcagcccagtatggtacagagcctggtggagaagctgcacgaggagtacacgcgccagaccgctgccctgcagcaggtcctctccacccggatcctggccatgaaggcctcgctctgcaagctgtcgccctgcacggtgacccgcgtgtgcgactaccacaccaagctcttcctcatcgccatcagctccaccctgaagtcgctgctgcgcccccactttctcaacacgcctgacaagagccccggcgaccggctgaccgagatctgcaccaagatcaccgacgtcgacattgacaaggtcatgatcaacctcaagacggaggaatttgtgctggacatgacacactgcaggcgctgcagcagctcttgcagtgggtgggcgacttcgtgctgtacctgctggccagcctacccaaccagccctgccccacctcggagccctgccccacctcggagccctcccccacctcggagccctcccccacctcggagccctcctctccatgaagcctctgctggttccctgctgaggccgggccacagcttcctgcgggacggcacctcgctgggcatgcttcgggaattgatggtggtcatccgcatctggggccttctgaagcccagctgcctgcccgtgtatacggccacctcggatacccaggacagcatgtccctgctcttccgcctgctcaccaagctctggatctgctgtcgcgatgagggcccagcgagcgagccggatgaggcgctggtggatgaatgctgcctgctgcccagccagctgcttatccccagcctggactggctgccagccagcgacggcctggttagccgcctgcagcccaagcagccccttcgtctgcagtttggccgggcgcccacgctgcctggcagtgctgccaccctgcagctcgacggcctcgccagggccccaggccagcccaagatcgaccacctgcggaggctgcaccttggcgcttgccccacggaggaatgcaaggcctgcaccaggtgcggctgtgtcaccatgctcaagtcgcccaacagaaccacggcggtgaagcagtgggagcagcgctggatcaagaactgcctgtgcggtgggctctggtggcgggtgcccctcagctacccctgagcccagctgcccctcagctactcctcagctacccctcagctgcccctgagcccggctgctgcaagagccaccgctcgccctggactctcctcggcgcggttaacctcagcccgccctgcagggctgttgaaggccgtgggccggacgcctgcgtgaccagcagagcttctgaggaagcccctgcctttgtccagctgggcccgcagtccacacaccactctcccaggaccccagatccctggaccatctgcatccagaggaccgtccgtgacggccgggggtccaggcggaccttgtggtgacccggctcgggcgtctcctcggtttccttgcctcacccgcggagagcgctgaacctggacaagcagcggctgggaaggacaggtccaataaacgccctctgcgccccaaaaaaaaaaaaaaaaaaaaaaaaaaaaaaaaaaaaaaaaaaaaaaaaaaa

SEQ ID NO: 170 - protein, 873 aa, Homo sapiens
MCDLRRPAAGGMMDLAYVCEWEKWSKSTHCPSVPLACAWSCRNLIAFTMDLRSDDQDLTRMIHILDTEHPWDLHSIPSEHHEAITCLEWDQSGSRLLSADADGQIKCWSMADHLANSWESSVGSLVEGDPIVALSWLHNGVKLALHVEKSGASSFGEKFSRVKFSPSLTLFGGKPMEGWIAVTVSGLVTVSLLKPSGQVLTSTESLCRLRARVALADIAFTGGGNIVVATADGSSASPVQFYKVCVSVVSEKCRIDTEILPSLFMRCTTDLNRKDKFPAITHLKFLARDMSEQVLLCASSQTSSIVECWSLRKEGLPVNNIFQQISPVVGDKQPTILKWRILSATNDLDRVSAVALPKLPISLTNTDLKVASDTQFYPGLGLALAFHDGSVHIVHRLSLQTMAVFYSSAAPRPVDEPAMKRPRTAGPAVHLKAMQLSWTSLALVGIDSHGKLSVLRLSPSMGHPLEVGLALRHLLFLLEYCMVTGYDWWDILLHVQPSMVQSLVEKLHEEYTRQTAALQQVLSTRILAMKASLCKLSPCTVTRVCDYHTKLFLIAISSTLKSLLRPHFLNTPDKSPGDRLTEICTKITDVDIDKVMINLKTEEFVLDMTHCRRCSSSCSGWATSCCTCWPAYPTSPAPPRSPAPPRSPPPPRSPPPPRSPPLHEASAGSLLRPGHSFLRDGTSLGMLRELMVVIRIWGLLKPSCLPVYTATSDTQDSMSLLFRLLTKLWICCRDEGPASEPDEALVDECCLLPSQLLIPSLDWLPASDGLVSRLQPKQPLRLQFGRAPTLPGSAATLQLDGLARAPGQPKIDHLRRLHLGACPTEECKACTRCGCVTMLKSPNRTTAVKQWEQRWIKNCLCGGLWWRVPLSYP

SEQ ID NO: 171 - DNA, 2539 bp, Homo sapiens
  CDS (219)...(2177): DRIP80
ctcgagaccgaggagggagcttgcggtgcgttctgggaaagttgctgggccagctcctttgtttccagtctgagcgttgcgttcggtttcccgagggtcttctgaggcaccgcggctgcgggcttctgagttcccggctctccgcagggaagcctcctcttcgtacctcgttttttggctcgtggggggtcctcccaccgctggccgacgcagccagcatgtccggggtgcgcgcagtgcggatcagcatcgaatcggcctgcgagaagcaggtccatgaggtgggcctggatggcaccgagacgtacctgcccccgctgtccatgtcgcagaatctggcgcgtctggcccagcggatagacttcagccagggttcgggctccgaggaggaggaggcggcggggaccgagggggacgcgcaggactggccgggcgccgggtccagcgcagaccaggacgacgaggaaggagtggtaaaatttcagccttccctttggccttgggactcagtgaggaacaatttgagaagtgccctgacagagatgtgtgttctctatgatgttctcagtattgttagggataaaaaatttatgactcttgatcctgtctctcaggatgcacttcctccaaaacagaatcctcagacgttgcaattgatatctaaaaagaagtcacttgctggagcagcacaaatcttattgaagggggcagaaagactgactaaatcagttaccgaaaaccaagaaaacaagctacaaagagacttcaattctgagcttttgcgattacggcaacactggaaacttcgaaaagttggagataaaattctcggagatctgagctacagaagtgcaggatctctctttcctcatcatggtacatttgaagtaataaagaatacagatctcgatctggataaaaagatacctgaagattactgtcctcttgatgtccaaattcctagtgatttagaggggtctgcatatatcaaggtttcaatacaaaaacaggctccagatataggtgacctcggcacagttaacctcttcaaacgacctttgcccaaatccaaaccaggttccccacattggcagacaaaattagaagcggcacagaatgttctcttatgtaaagaaatttttgcacagctctctcgggaagctgttcaaattaaatcacaagtccctcacattgtggtgaaaaaccagattatcttcttcagcttttccgagcttgcagttaatctatttctttgtgcccattcctcaaatgataagaaatcccaaaattttgctactgagaagcaatgtccggaggaccacctttatgtcctagagcataatttgcatctactgattagagagtttcataaacagaccttgagttccatcatgatgcctcatccagcaagtgcaccttttggccacaagagaatgagactttcgggtcctcaagcttttgataaaaatgaaattaattcattacagtccagtgaagggcttctggaaaaaataattaaacaagcaaagcatatttttctaaggagtagagctgctgcaaccattgacagcttagcaagccgaattgaggatcctcagatacaggctcattggtcaaatatcaatgatgtttatgaatctagtgtgaaagttttaatcacatcacaaggctatgaacaaatatgcaagtccattcaactgcaattgaatattggagttgagcagattcgagttgtacatagagatggaagagtaattacactgtcttatcaggagcaggagctacaggattttcttctgtctcagatgtcacagcaccaggtacatgcagttcagcaactcgccaaggttatgggctggcaagtactgagcttcagtaatcatgtgggacttggacctatagagagcattggtaatgcatctgccatcacggtggcctccccaagtggtgactatgctatttcagttcgtaatggacctgaaagtggcagcaagattatggttcagtttcctcgtaaccaatgtaaagaccttccaaaaagtgatgttttacaagataacaaatggagtcatcttcgtgggccattcaaagaagttcagtggaataaaatggaaggtcgaaattttgtttataaaatggagctgcttatgtctgcacttagcccttgtctactatgattttttccagatgtttcctaaagaagtttccagaaactttgacttgaaatgtttgcagatcaactataagcacaaagaagagataacttccaaaagagtgctgtttttaaaaataataattaggaaatgtttatttagcactttcaaacttttcactttataaatgacaagtgctttgaaatgcagaagtttatgtacagttgtatatacagtatgacaagatgtaaaataatatgtttttcatgcagtttaaaatattactaacttaaggttttctatgtgctttttaaaatattccttctttgatgttgacatcaaataaagtatgtggtttaaaaaaaaaaaaaattaaaaaaaaaaaa

SEQ ID NO: 172 - protein, 652 aa, Homo sapiens [sequence omitted]

SEQ ID NO: 173 - DNA, 1424 bp, Homo sapiens
  CDS (26)...(838): DRIP36
ggccggtggcgggactctggggaaaatggctgcgtcttcgagtggtgagaaggagaaggagcggctgggaggcggtttgggagtggcgggtggtaacagcacacgagagcggctgctgtctgcgcttgaggacttggaggtcctgtctagggaacttatagaaatgctggcaatttcaagaaaccaaaagttgttacaggctggagaggaaaaccaggtcctggagttgttaattcaccgagatggggaatttcaagaactaatgaaattggcacttaatcagggaaaaattcatcatgaaatgcaagttttagaaaaagaagtagagaagagagacagtgatattcagcagctacaaaaacagctaaaggaagcagaacaaatactggcaacagctgtttaccaagcgaaggagaaactcaagtcaatagaaaaagcaagaaaaggtgctatctcctctgaagaaataattaagtatgcacataggatcagtgcaagtaatgctgtatgtgctccactgacctgggttccaggggacccccggagaccctacccaactgatttagagatgagaagtgggttactgggtcagatgaacaatccttccactaatggcgtgaatggccatttaccaggagatgcacttgcagcaggaagattgccagatgtccttgctccacagtatccatggcagtcaaatgacatgtcgatgaatatgttaccaccaaatcatagtagtgactttttgttggaacctcctgggcataataaagaaaatgaagatgatgtagagattatgtcaacggactcctcaagcagtagtagtgagtctgattgaaaaacttaaaagacaatatacagaattgaatactgtagaattctgtttctttaacagtagcagggaaatgtaaactacaggtgacaaaaaatacccaggtaaacactggctttggtagaattgtgcagtcattaaaagtcaaaattttttgactttctttttaaagccaaagaccatagttttagttttaagccactaggtagatatttaggggaatagtcaaaatttactgttgaaaaagcagttgctatgtgctttcttaccctgttctgttccagttttgctggatttgtacatagccattctagaaatagagttgagggaaattatccatatacatatcactaataggcttcttggaattatttagaaaagcatttttaaactggcagtggatgactgaataggcatcatatttctttttgtgtgtcatttaaaagtaacaaaaactgccatttgacagtaaaggctcttggcttctgttggaggcatgggaaattgtctcaatttgtacagtttgtaattgtaatttttgtaaataaatttgtttgtacattgaaaaaaaaaaaaaaaaaaaaaaaaaaaa

SEQ ID NO: 174 - protein, 270 aa, Homo sapiens
MAASSSGEKEKERLGGGLGVAGGNSTRERLLSALEDLEVLSRELIEMLAISRNQKLLQAGEENQVLELLIHRDGEFQELMKLALNQGKIHHEMQVLEKEVEKRDSDIQQLQKQLKEAEQILATAVYQAKEKLKSIEKARKGAISSEEIIKYAHRISASNAVCAPLTWVPGDPRRPYPTDLEMRSGLLGQMNNPSTNGVNGHLPGDALAAGRLPDVLAPQYPWQSNDMSMNMLPPNHSSDFLLEPPGHNKENEDDVEIMSTDSSSSSSESD

SEQ ID NO: 175 - DNA, 9046 bp, Homo sapiens
  CDS (1200)...(8444): CBP
ccttgtttgtgtgctaggctgggggggagagagggcgagagagagcgggcgagagtgggcaagcaggacgccgggctgagtgctaactgcgggacgcagagagtgcggaggggagtcgggtcggagagaggcggcaggggccagaacagtggcagggggcccggggcgcacgggctgaggcgacccccagccccctcccgtccgcacacacccccaccgcggtccagcagccgggccggcgtcgacgctaggggggaccattacataacccgcgccccggccgtcttctcccgccgccgcggcgcccgaactgagcccggggcgggcgctccagcactggccgccggcgtggggcgtagcagcggccgtattattatttcgcggaaaggaaggcgaaggaggggagcgccggcgcgaggaggggccgcctgcgcccgccgccggagcggggcctcctcggtgggctccgcgtcggcgcgggcgtgcgggcggcgctgctcggcccggccccctcggccctctggtccggccagctccgctcccggcgtccttgccgcgcctccgccggccgccgcgcgatgtgaggcggcggcgccagcctggctctcggctcgggcgagttctctgcggccattaggggccggtgcggcggcggcgcggagcgcggcggcaggaggagggttcggagggtgggggcgcaggcccgggagggggcaccgggaggaggtgagtgtctcttgtcgcctcctcctctccccccttttcgcccccgcctccttgtggcgatgagaaggaggaggacagcgccgaggaggaagaggttgatggcggcggcggagctccgagagacctcggctgggcaggggccggccgtggcgggccggggactgcgcctctagagccgcgagttctcgggaattcgccgcagcggaccggcctcggcgaatttgtgctcttgtgccctcctccgggcttgggccaggccggcccctcgcacttgcccttaccttttctatcgagtccgcatccctctccagccactgcgacccggcgaagagaaaaaggaacttcccccaccccctcgggtgccgtcggagccccccagcccacccctgggtgcggcgcggggaccccgggccgaagaagagatttcctgaggattctggttttcctcgcttgtatctccgaaagaattaaaaatggccgagaatgtggtggaaccggggccgccttcagccaagcggcctaaactctcatctccggccctctcggcgtccgccagcgatggcacagattttggctctctatttgacttggagcacgacttaccagatgaattaatcaactctacagaattgggactaaccaatggtggtgatattaatcagcttcagacaagtcttggcatggtacaagatgcagcttctaaacataaacagctgtcagaattgctgcgatctggtagttcccctaacctcaatatgggagttggtggcccaggtcaagtcatggccagccaggcccaacagagcagtcctggattaggtttgataaatagcatggtcaaaagcccaatgacacaggcaggcttgacttctcccaacatggggatgggcactagtggaccaaatcagggtcctacgcagtcaacaggtatgatgaacagtccagtaaatcagcctgccatgggaatgaacacagggacgaatgcgggcatgaatcctggaatgttggctgcaggcaatggacaagggataatgcctaatcaagtcatgaacggttcaattggagcaggccgagggcgacaggatatgcagtacccaaacccaggcatgggaagtgctggcaacttactgactgagcctcttcagcagggctctccccagatgggaggacaaacaggattgagaggcccccagcctcttaagatgggaatgatgaacaaccccaatccttatggttcaccatatactcagaatcctggacagcagattggagccagtggccttggtctccagattcagacaaaaactgtactatcaaataacttatctccatttgctatggacaaaaaggcagttcctggtggaggaatgcccaacatgggtcaacagccagccccgcaggtccagcagccaggtctggtgactccagttgcccaagggatgggttctggagcacatacagctgatccagagaagcgcaagctcatccagcagcagcttgttctccttttgcatgctcacaagtgccagcgccgggaacaggccaatggggaagtgaggcagtgcaaccttccccactgtcgcacaatgaagaatgtcctaaaccacatgacacactgccagtcaggcaagtcttgccaagtggcacactgtgcatcttctcgacaaatcatttcacactggaagaattgtacaagacatgattgtcctgtgtgtctccccctcaaaaatgctggtgataagagaaatcaacagccaattttgactggagcacccgttggacttggaaatcctagctctctaggggtgggtcaacagtctgcccccaacctaagcactgttagtcagattgatcccagctccatagaaagagcctatgcagctcttggactaccctatcaagtaaatcagatgccgacacaaccccaggtgcaagcaaagaaccagcagaatcagcagcctgggcagtctccccaaggcatgcggcccatgagcaacatgagtgctagtcctatgggagtaaatggaggtgtaggagttcaaacgccgagtcttctttctgactcaatgttgcattcagccataaattctcaaaacccaatgatgagtgaaaatgccagtgtgccctccctgggtcctatgccaacagcagctcaaccatccactactggaattcggaaacagtggcacgaagatattactcaggatcttcgaaatcatcttgttcacaaactcgtccaagccatatttcctacgccggatcctgctgctttaaaagacagacggatggaaaacctagttgcatatgctcggaaagttgaaggggacatgtatgaatctgcaaacaatcgagcggaatactaccaccttctagctgagaaaatctataagatccagaaagaactagaagaaaaacgaaggaccagactacagaagcagaacatgctaccaaatgctgcaggcatggttccagtttccatgaatccagggcctaacatgggacagccgcaaccaggaatgacttctaatggccctctacctgacccaagtatgatccgtggcagtgtgccaaaccagatgatgcctcgaataactccacaatctggtttgaatcaatttggccagatgagcatggcccagccccctattgtaccccggcaaacccctcctcttcagcaccatggacagttggctcaacctggagctctcaacccgcctatgggctatgggcctcgtatgcaacagccttccaaccagggccagttccttcctcagactcagttcccatcacagggaatgaatgtaacaaatatccctttggctccgtccagcggtcaagctccagtgtctcaagcacaaatgtctagttcttcctgcccggtgaactctcctataatgcctccagggtctcaggggagccacattcactgtccccagcttcctcaaccagctcttcatcagaattcaccctcgcctgtacctagtcgtacccccacccctcaccatactcccccaagcataggggctcagcagccaccagcaacaacaattccagcccctgttcctacaccaccagccatgccacctgggccacagtcccaggctctacatccccctccaaggcagacacctacaccaccaacaacacaacttccccaacaagtgcagccttcacttcctgctgcaccttctgctgaccagccccagcagcagcctcgctcacagcagagcacagcagcgtctgttcctaccccaaacgcaccgctgcttcctccgcagcctgcaactccactttcccagccagctgtaagcattgaaggacaggtatcaaatcctccatctactagtagcacagaagtgaattctcaggccattgctgagaagcagccttcccaggaagtgaagatggaggccaaaatggaagtggatcaaccagaaccagcagatacgcagccggaggatatttcagagtctaaagtggaagactgtaaaatggaatctaccgaaacagaagagagaagcactgagttaaaaactgaaataaaagaggaggaagaccagccaagtacttcagctacccagtcatctccggctccaggacagtcaaagaaaaagattttcaaaccagaagaactacgacaggcactgatgccaacattggaggcactttaccgtcaggatccagaatcccttccctttcgtcaacctgtggaccctcagcttttaggaatccctgattactttgatattgtgaagagccccatggatctttctaccattaagaggaagttagacactggacagtatcaggagccctggcagtatgtcgatgatatttggcttatgttcaataatgcctggttatataaccggaaaacatcacgggtatacaaatactgctccaagctctctgaggtctttgaacaagaaattgacccagtgatgcaaagccttggatactgttgtggcagaaagttggagttctctccacagacactgtgttgctacggcaaacagttgtgcacaatacctcgtgatgccacttattacagttaccagaacaggtatcatttctgtgagaagtgtttcaatgagatccaaggggagagcgtttctttgggggatgacccttcccagcctcaaactacaataaataaagaacaattttccaagagaaaaaatgacacactggatcctgaactgtttgttgaatgtacagagtgcggaagaaagatgcatcagatctgtgtccttcaccatgagatcatctggcctgctggattcgtctgtgatggctgtttaaagaaaagtgcacgaactaggaaagaaaataagttttctgctaaaaggttgccatctaccagacttggcacctttctagagaatcgtgtgaatgactttctgaggcgacagaatcaccctgagtcaggagaggtcactgttagagtagttcatgcttctgacaaaaccgtggaagtaaaaccaggcatgaaagcaaggtttgtggacagtggagagatggcagaatcctttccataccgaaccaaagccctctttgcctttgaagaaattgatggtgttgacctgtgcttctttggcatgcatgttcaagagtatggctctgactgccctccacccaaccagaggagagtatacatatcttacctcgatagtgttcatttcttccgtcctaaatgcttgaggactgcagtctatcatgaaatcctaattggatatttagaatatgtcaagaaattaggttacacaacagggcatatttgggcatgtccaccaagtgagggagatgattatatcttccattgccatcctcctgaccagaagatacccaagcccaagcgactgcaggaatggtacaaaaaaatgcttgacaaggctgtatcagagcgtattgtccatgactacaaggatatttttaaacaagctactgaagatagattaacaagtgcaaaggaattgccttatttcgagggtgatttctggcccaatgttctggaagaaagcattaaggaactggaacaggaggaagaagagagaaaacgagaggaaaacaccagcaatgaaagcacagatgtgaccaagggagacagcaaaaatgctaaaaagaagaataataagaaaaccagcaaaaataagagcagcctgagtaggggcaacaagaagaaacccgggatgcccaatgtatctaacgacctctcacagaaactatatgccaccatggagaagcataaagaggtcttctttgtgatccgcctcattgctggccctgctgccaactccctgcctcccattgttgatcctgatcctctcatcccctgcgatctgatggatggtcgggatgcgtttctcacgctggcaagggacaagcacctggagttctcttcactccgaagagcccagtggtccaccatgtgcatgctggtggagctgcacacgcagagccaggaccgctttgtctacacctgcaatgaatgcaagcaccatgtggagacacgctggcactgtactgtctgtgaggattatgacttgtgtatcacctgctataacactaaaaaccatgaccacaaaatggagaaactaggccttggcttagatgatgagagcaacaaccagcaggctgcagccacccagagcccaggcgattctcgccgcctgagtatccagcgctgcatccagtctctggtccatgcttgccagtgtcggaatgccaattgctcactgccatcctgccagaagatgaagcgggttgtgcagcataccaagggttgcaaacggaaaaccaatggcgggtgccccatctgcaagcagctcattgccctctgctgctaccatgccaagcactgccaggagaacaaatgcccggtgccgttctgcctaaacatcaagcagaagctccggcagcaacagctgcagcaccgactacagcaggcccaaatgcttcgcaggaggatggccagcatgcagcggactggtgtggttgggcagcaacagggcctcccttcccccactcctgccactccaacgacaccaactggccaacagccaaccaccccgcagacgccccagcccacttctcagcctcagcctacccctcccaatagcatgccaccctacttgcccaggactcaagctgctggccctgtgtcccagggtaaggcagcaggccaggtgacccctccaacccctcctcagactgctcagccaccccttccagggcccccacctacagcagtggaaatggcaatgcagattcagagagcagcggagacgcagcgccagatggcccacgtgcaaatttttcaaaggccaatccaacaccagatgcccccgatgactcccatggcccccatgggtatgaacccacctcccatgaccagaggtcccagtgggcatttggagccagggatgggaccgacagggatgcagcaacagccaccctggagccaaggaggattgcctcagccccagcaactacagtctgggatgccaaggccagccatgatgtcagtggcccagcatggtcaacctttgaacatggctccacaaccaggattgggccaggtaggtatcagcccactcaaaccaggcactgtgtctcaacaagccttacaaaaccttttgcggactctcaggtctcccagctctcccctgcagcagcaacaggtgcttagtatccttcacgccaacccccagctgttggctgcattcatcaagcagcgggctgccaagtatgccaactctaatccacaacccatccctgggcagcctggcatgccccaggggcagccagggctacagccacctaccatgccaggtcagcagggggtccactccaatccagccatgcagaacatgaatccaatgcaggcgggcgttcagagggctggcctgccccagcagcaaccacagcagcaactccagccacccatgggagggatgagcccccaggctcagcagatgaacatgaaccacaacaccatgccttcacaattccgagacatcttgagacgacagcaaatgatgcaacagcagcagcaacagggagcagggccaggaataggccctggaatggccaaccataaccagttccagcaaccccaaggagttggctacccaccacagccgcagcagcggatgcagcatcacatgcaacagatgcaacaaggaaatatgggacagataggccagcttccccaggccttgggagcagaggcaggtgccagtctacaggcctatcagcagcgactccttcagcaacagatggggtcccctgttcagcccaaccccatgagcccccagcagcatatgctcccaaatcaggcccagtccccacacctacaaggccagcagatccctaattctctctccaatcaagtgcgctctccccagcctgtcccttctccacggccacagtcccagcccccccactccagtccttccccaaggatgcagcctcagccttctccacaccacgtttccccacagacaagttccccacatcctggactggtagctgcccaggccaaccccatggaacaagggcattttgccagcccggaccagaattcaatgctttctcagcttgctagcaatccaggcatggcaaacctccatggtgcaagcgccacggacctgggactcagcaccgataactcagacttgaattcaaacctctcacagagtacactagacatacactagagacaccttgtattttgggagcaaaaaaattattttctcttaacaagactttttgtactgaaaacaatttttttgaatctttcgtagcctaaaagacaattttccttggaacacataagaactgtgcagtagccgtttgtggtttaaagcaaacatgcaagatgaacctgagggatgatagaatacaaagaatatatttttgttatgggctggttaccaccagcctttcttcccctttgtgtgtgtggttcaagtgtgcactgggaggaggctgaggcctgtgaagccaaacaatatgctcctgccttgcacctccaataggttttattattttttttaaattaatgaacatatgtaatattaatgaacatatgtaatattaatagttattatttactggtgcagatggttgacatttttccctattttcctcactttatggaagagttaaaacatttctaaaccagaggacaaaaggggttaatgttactttgaaattacattctatatatatataaatatatataaatatatattaaaataccagttttttttctctgggtgcaaagatgttcattcttttaaaaaatgtttaaaaaaaa

SEQ ID NO: 176 - protein, 2414 aa, Homo sapiens
MAENVVEPGPPSAKRPKLSSPALSASASDGTDFGSLFDLEHDLPDELINSTELGLTNGGDINQLQTSLGMVQDAASKHKQLSELLRSGSSPNLNMGVGGPGQVMASQAQQSSPGLGLINSMVKSPMTQAGLTSPNMGMGTSGPNQGPTQSTGMMNSPVNQPAMGMNTGTNAGMNPGMLAAGNGQGIMPNQVMNGSIGAGRGRQDMQYPNPGMGSAGNLLTEPLQQGSPQMGGQTGLRGPQPLKMGMMNNPNPYGSPYTQNPGQQIGASGLGLQIQTKTVLSNNLSPFAMDKKAVPGGGMPNMGQQPAPQVQQPGLVTPVAQGMGSGAHTADPEKRKLIQQQLVLLLHAHKCQRREQANGEVRQCNLPHCRTMKNVLNHMTHCQSGKSCQVAHCASSRQIISHWKNCTRHDCPVCLPLKNAGDKRNQQPILTGAPVGLGNPSSLGVGQQSAPNLSTVSQIDPSSIERAYAALGLPYQVNQMPTQPQVQAKNQQNQQPGQSPQGMRPMSNMSASPMGVNGGVGVQTPSLLSDSMLHSAINSQNPMMSENASVPSLGPMPTAAQPSTTGIRKQWHEDITQDLRNHLVHKLVQAIFPTPDPAALKDRRMENLVAYARKVEGDMYESANNRAEYYHLLAEKIYKIQKELEEKRRTRLQKQNMLPNAAGMVPVSMNPGPNMGQPQPGMTSNGPLPDPSMIRGSVPNQMMPRITPQSGLNQFGQMSMAQPPIVPRQTPPLQHHGQLAQPGALNPPMGYGPRMQQPSNQGQFLPQTQFPSQGMNVTNIPLAPSSGQAPVSQAQMSSSSCPVNSPIMPPGSQGSHIHCPQLPQPALHQNSPSPVPSRTPTPHHTPPSIGAQQPPATTIPAPVPTPPAMPPGPQSQALHPPPRQTPTPPTTQLPQQVQPSLPAAPSADQPQQQPRSQQSTAASVPTPNAPLLPPQPATPLSQPAVSIEGQVSNPPSTSSTEVNSQAIAEKQPSQEVKMEAKMEVDQPEPADTQPEDISESKVEDCKMESTETEERSTELKTEIKEEEDQPSTSATQSSPAPGQSKKKIFKPEELRQALMPTLEALYRQDPESLPFRQPVDPQLLGIPDYFDIVKSPMDLSTIKRKLDTGQYQEPWQYVDDIWLMFNNAWLYNRKTSRVYKYCSKLSEVFEQEIDPVMQSLGYCCGRKLEFSPQTLCCYGKQLCTIPRDATYYSYQNRYHFCEKCFNEIQGESVSLGDDPSQPQTTINKEQFSKRKNDTLDPELFVECTECGRKMHQICVLHHEIIWPAGFVCDGCLKKSARTRKENKFSAKRLPSTRLGTFLENRVNDFLRRQNHPESGEVTVRVVHASDKTVEVKPGMKARFVDSGEMAESFPYRTKALFAFEEIDGVDLCFFGMHVQEYGSDCPPPNQRRVYISYLDSVHFFRPKCLRTAVYHEILIGYLEYVKKLGYTTGHIWACPPSEGDDYIFHCHPPDQKIPKPKRLQEWYKKMLDKAVSERIVHDYKDIFKQATEDRLTSAKELPYFEGDFWPNVLEESIKELEQEEEERKREENTSNESTDVTKGDSKNAKKKNNKKTSKNKSSLSRGNKKKPGMPNVSNDLSQKLYATMEKHKEVFFVIRLIAGPAANSLPPIVDPDPLIPCDLMDGRDAFLTLARDKHLEFSSLRRAQWSTMCMLVELHTQSQDRFVYTCNECKHHVETRWHCTVCEDYDLCITCYNTKNHDHKMEKLGLGLDDESNNQQAAATQSPGDSRRLSIQRCIQSLVHACQCRNANCSLPSCQKMKRVVQHTKGCKRKTNGGCPICKQLIALCCYHAKHCQENKCPVPFCLNIKQKLRQQQLQHRLQQAQMLRRRMASMQRTGVVGQQQGLPSPTPATPTTPTGQQPTTPQTPQPTSQPQPTPPNSMPPYLPRTQAAGPVSQGKAAGQVTPPTPPQTAQPPLPGPPPTAVEMAMQIQRAAETQRQMAHVQIFQRPIQHQMPPMTPMAPMGMNPPPMTRGPSGHLEPGMGPTGMQQQPPWSQGGLPQPQQLQSGMPRPAMMSVAQHGQPLNMAPQPGLGQVGISPLKPGTVSQQALQNLLRTLRSPSSPLQQQQVLSILHANPQLLAAFIKQRAAKYANSNPQPIPGQPGMPQGQPGLQPPTMPGQQGVHSNPAMQNMNPMQAGVQRAGLPQQQPQQQLQPPMGGMSPQAQQMNMNHNTMPSQFRDILRRQQMMQQQQQQGAGPGIGPGMANHNQFQQPQGVGYPPQPQQRMQHHMQQMQQGNMGQIGQLPQALGAEAGASLQAYQQRLLQQQMGSPVQPNPMSPQQHMLPNQAQSPHLQGQQIPNSLSNQVRSPQPVPSPRPQSQPPHSSPSPRMQPQPSPHHVSPQTSSPHPGLVAAQANPMEQGHFASPDQNSMLSQLASNPGMANLHGASATDLGLSTDNSDLNSNLSQSTLDIH

SEQ ID NO: 177 - DNA, 4838 bp, Homo sapiens
  CDS (447)...(2945): PCAF
gcggaaaagaggccgtggggggcctcccagcgctggcagacaccgtgaggctggcagccgccggcacgcacacctagtccgcagtcccgaggaacatgtccgcagccagggcgcggagcagagtcccgggcaggagaaccaagggagggcgtgtgctgtggcggcggcggcagcggcagcggagccgctagtcccctccctcctgggggagcagctgccgccgctgccgccgccgccaccaccatcagcgcgcggggcccggccagagcgagccgggcgagcggcgcgctagggggagggcgggggcggggaggggggtgggcgaagggggcgggagggcgtggggggagggtctcgctctcccgactaccagagcccgagagggagaccctggcggcggcggcggcgcctgacactcggcgcctcctgccgtgctccggggcggcatgtccgaggctggcggggccgggccgggcggctgcggggcaggagccggggcaggggccgggcccggggcgctgcccccgcagcctgcggcgcttccgcccgcgcccccgcagggctccccctgcgccgctgccgccgggggctcgggcgcctgcggtccggcgacggcagtggctgcagcgggcacggccgaaggaccgggaggcggtggctcggcccgaatcgccgtgaagaaagcgcaactacgctccgctccgcgggccaagaaactggagaaactcggagtgtactccgcctgcaaggccgaggagtcttgtaaatgtaatggctggaaaaaccctaacccctcacccactccccccagagccgacctgcagcaaataattgtcagtctaacagaatcctgtcggagttgtagccatgccctagctgctcatgtttcccacctggagaatgtgtcagaggaagaaatgaacagactcctgggaatagtattggatgtggaatatctctttacctgtgtccacaaggaagaagatgcagataccaaacaagtttatttctatctatttaagctcttgagaaagtctattttacaaagaggaaaacctgtggttgaaggctctttggaaaagaaacccccatttgaaaaacctagcattgaacagggtgtgaataactttgtgcagtacaaatttagtcacctgccagcaaaagaaaggcaaacaatagttgagttggcaaaaatgttcctaaaccgcatcaactattggcatctggaggcaccatctcaacgaagactgcgatctcccaatgatgatatttctggatacaaagagaactacacaaggtggctgtgttactgcaacgtgccacagttctgcgacagtctacctcggtacgaaaccacacaggtgtttgggagaacattgcttcgctcggtcttcactgttatgaggcgacaactcctggaacaagcaagacaggaaaaagataaactgcctcttgaaaaacgaactctaatcctcactcatttcccaaaatttctgtccatgctagaagaagaagtatatagtcaaaactctcccatctgggatcaggattttctctcagcctcttccagaaccagccagctaggcatccaaacagttatcaatccacctcctgtggctgggacaatttcatacaattcaacctcatcttcccttgagcagccaaacgcagggagcagcagtcctgcctgcaaagcctcttctggacttgaggcaaacccaggagaaaagaggaaaatgactgattctcatgttctggaggaggccaagaaaccccgagttatgggggatattccgatggaattaatcaacgaggttatgtctaccatcacggaccctgcagcaatgcttggaccagagaccaattttctgtcagcacactcggccagggatgaggcggcaaggttggaagagcgcaggggtgtaattgaatttcacgtggttggcaattccctcaaccagaaaccaaacaagaagatcctgatgtggctggttggcctacagaacgttttctcccaccagctgccccgaatgccaaaagaatacatcacacggctcgtctttgacccgaaacacaaaacccttgctttaattaaagatggccgtgttattggtggtatctgtttccgtatgttcccatctcaaggattcacagagattgtcttctgtgctgtaacctcaaatgagcaagtcaagggctatggaacacacctgatgaatcatttgaaagaatatcacataaagcatgacatcctgaacttcctcacatatgcagatgaatatgcaattggatactttaagaaacagggtttctccaaagaaattaaaatacctaaaaccaaatatgttggctatatcaaggattatgaaggagccactttaatgggatgtgagctaaatccacggatcccgtacacagaattttctgtcatcattaaaaagcagaaggagataattaaaaaactgattgaaagaaaacaggcacaaattcgaaaagtttaccctggactttcatgttttaaagatggagttcgacagattcctatagaaagcattcctggaattagagagacaggctggaaaccgagtggaaaagagaaaagtaaagagcccagagaccctgaccagctttacagcacgctcaagagcatcctccagcaggtgaagagccatcaaagcgcttggcccttcatggaacctgtgaagagaacagaagctccaggatattatgaagttataaggttccccatggatctgaaaaccatgagtgaacgcctcaagaataggtactacgtgtctaagaaattattcatggcagacttacagcgagtctttaccaattgcaaagagtacaacccccctgagagtgaatactacaaatgtgccaatatcctggagaaattcttcttcagtaaaattaaggaagctggattaattgacaagtgattttttttcccctctgcttcttagaaactcaccaagcagtgtgcctaaagcaaggtggtttagttttttacaaagaattggacatgatgtattgaagagacttgtaaatgtaataattagcacttttgaaaaaacaaaaaacctccttttagcttttcagatatgtatttaaattgaagtcataggacatttttattttatggaatagattttaatctatttactactattaaggtaaattttctatggcatgtccattagctatttcatgatagatgattaggggtttcctcaaaacctgtgtgtgaggaaattgcacacagtagcaaaatttggggaaatccataacattttcagaccatgaatgaatgtttccatttttttctaatggaatgtgagagtttacttttattttattctgaaggactttaaggaagggatacatgattttaaaaaagcctgtaagaggtgaaatatgtgatgtttgaagtctctttatagactttttatatatattttttaaaacactcatctagatgaggtgctttgagcagttctgaaaaatgcagttccaggaaagcaactgctttggttcctaaggaagaaattctaaataatgcaaacttttaaaataagcatctaggtttttgataattctgtctacttacaacaaacttgttagtacataaccactattttaataattattttctctacacaaatgtgtaatatcatatttgactttgcttatgcaggccataagttccaaaagataatttccctgcccacaaaggcataaacttgaaaacacatgagattgaatcaacatgctttaataggaaaagatgtatggtctatatatgtatcaatctggtgaatcctcgttctaataaaggttctttttcttttctatgatacacacagccacgctgataatatgcaaatgaacattttcctttatgtctctccagataatgtttattgtctgaggtaaattaaattcccaccagggtttgctgtcagtattttaacacccacattagtatatgcgtccagggtcataaccccctaaaatccatcatgcaaccttattaatctgtcttgggattccagtttagtgcttggatttatttcctgattacactacatagaaaagtgagacatctgccattcccaactctgggaaaaccaactaatatacaaccatataaatgaaggccatcttgatggtctcaacactaatttttatgatgcaaatttatacactgatttttgtaaaggacaaagttttaaaagcgtatttaacttgatgttttctatcagcataaataaaatggtcatgaatagtcattaaaaacagttgccagtgataatctgcatgaaggaaaaagaaccctgcaaatggctattgagttggaagtattgtttttgatatgtaagagatattcagaatgctcacactgaaaatgcctcaactttttaaagtgtaagaaaccaccatgagtggtgtctagatttctaatgaagaatcatgatacagtttggattaagtatcttggactggttttaaacagtgctttgtaccggatctgctgaagcatctgtccagctggtatcctgtgaaagtttgttattttctgagtagacattcttatagagtattgtctttaaaatcagattgtctcttctatattgaaagcatttttatgttttctaatttaaaaattaatattttcttatagatattgtgcaataaagctgaagtagaatgtgtggtttttgcaaatgctttaacagctgataaaaattttacatttgtaaaattaatatattgtactggtacaaaatagttttaaattatattttaaaaagcttccaaaaaaaaaaaaaaaa

SEQ ID NO: 178 - protein, 832 aa, Homo sapiens
MSEAGGAGPGGCGAGAGAGAGPGALPPQPAALPPAPPQGSPCAAAAGGSGACGPATAVAAAGTAEGPGGGGSARIAVKKAQLRSAPRAKKLEKLGVYSACKAEESCKCNGWKNPNPSPTPPRADLQQIIVSLTESCRSCSHALAAHVSHLENVSEEEMNRLLGIVLDVEYLFTCVHKEEDADTKQVYFYLFKLLRKSILQRGKPVVEGSLEKKPPFEKPSIEQGVNNFVQYKFSHLPAKERQTIVELAKMFLNRINYWHLEAPSQRRLRSPNDDISGYKENYTRWLCYCNVPQFCDSLPRYETTQVFGRTLLRSVFTVMRRQLLEQARQEKDKLPLEKRTLILTHFPKFLSMLEEEVYSQNSPIWDQDFLSASSRTSQLGIQTVINPPPVAGTISYNSTSSSLEQPNAGSSSPACKASSGLEANPGEKRKMTDSHVLEEAKKPRVMGDIPMELINEVMSTITDPAAMLGPETNFLSAHSARDEAARLEERRGVIEFHVVGNSLNQKPNKKILMWLVGLQNVFSHQLPRMPKEYITRLVFDPKHKTLALIKDGRVIGGICFRMFPSQGFTEIVFCAVTSNEQVKGYGTHLMNHLKEYHIKHDILNFLTYADEYAIGYFKKQGFSKEIKIPKTKYVGYIKDYEGATLMGCELNPRIPYTEFSVIIKKQKEIIKKLIERKQAQIRKVYPGLSCFKDGVRQIPIESIPGIRETGWKPSGKEKSKEPRDPDQLYSTLKSILQQVKSHQSAWPFMEPVKRTEAPGYYEVIRFPMDLKTMSERLKNRYYVSKKLFMADLQRVFTNCKEYNPPESEYYKCANILEKFFFSKIKEAGLIDK

SEQ ID NO: 179 - DNA, 2968 bp, Homo sapiens
  CDS (127)...(1953): CARM1
ggcggtagcggcagcggcggcggcggcggcggcggcggcggcggcggcggcggcggcggcggcagcggcggcggcctgggcccgggcgcagcggcggcggcggcggggcctggagccggatctaagatggcagcggcggcggcggcggtggggccgggcgcgggcggcgcggggtcggcggtcccgggcggcgcggggccctgcgctaccgtgtcggtgttccccggcgcccgcctcctcaccatcggcgacgcgaacggcgagatccagcggcacgcggagcagcaggcgctgcgcctcgaggtgcgcgccggcccggactcggcgggcatcgccctctacagccatgaagatgtgtgtgtctttaagtgctcagtgtcccgagagacagagtgcagccgtgtgggcaagcagtccttcatcatcaccctgggctgcaacagcgtcctcatccagttcgccacacccaacgatttctgttccttctacaacatcctgaaaacctgccggggccacaccctggagcggtctgtgttcagcgagcggacggaggagtcttctgccgtgcagtacttccagttttatggctacctgtcccagcagcagaacatgatgcaggactacgtgcggacaggcacctaccagcgcgccatcctgcaaaaccacaccgacttcaaggacaagatcgttcttgatgttggctgtggctctgggatcctgtcgttttttgccgcccaagctggagcacggaaaatctacgcggtggaggccagcaccatggcccagcacgctgaggtcttggtgaagagtaacaacctgacggaccgcatcgtggtcatcccgggcaaggtggaggaggtgtcactccccgagcaggtggacatcatcatctcggagcccatgggctacatgctcttcaacgagcgcatgctggagagctacctccacgccaagaagtacctgaagcccagcggaaacatgtttcctaccattggtgacgtccaccttgcacccttcacggatgaacagctctacatggagcagttcaccaaggccaacttctggtaccagccatctttccatggagtggacctgtcggccctccgaggtgccgcggtggatgagtatttccggcagcctgtggtggacacatttgacatccggatcctgatggccaagtctgtcaagtacacggtgaacttcttagaagccaaagaaggagatttgcacaggatagaaatcccattcaaattccacatgctgcattcagggctggtccacggcctggctttctggtttgacgttgctttcatcggctccataatgaccgtgtggctgtccacagccccgacagagcccctgacccactggtaccaggtgcggtgcctgttccagtcaccactgttcgccaaggcaggggacacgctctcagggacatgtctgcttattgccaacaaaagacagagctacgacatcagtattgtggcccaggtggaccagaccggctccaagtccagtaacctcctggatctgaaaaaccccttctttagatacacgggcacaacgccctcacccccacccggctcccactacacatctccctcggaaaacatgtggaacacgggcagcacctacaacctcagcagcgggatggccgtggcagggatgccgaccgcctatgacttgagcagtgttattgccagtggctccagcgtgggccacaacaacctgattcctttagccaacacggggattgtcaatcacacccactcccggatgggctccataatgagcacggggattgtccaagggtcctccggcgcccagggcagtggtggtggcagcacgagtgcccactatgcagtcaacagccagttcaccatgggcggccccgccatctccatggcgtcgcccatgtccatcccgaccaacaccatgcactacgggagctaggggcccgccccgcggactgacagcaccaggaaaccaaatgatgtccctgcccgccgcccccgccgggcggctttcccccttgtactggagaagctcgaacacccggtcacagctctctttgctatgggaactgggacacttttttacacgatgttgccgccgtccccaccctaacccccacctcccggccctgagcgtgtgtcgctgccatattttacacaaaatcatgttgtgggagccctcgtcccccctcctgcccgctctaccctgacctgggcttgtcatctgctggaacaggcgccatggggcctgccagccctgcctgccaggtcccttagcacctgtccccctgcctgtctccagtgggaaggtagcctggccaggcggggcctccccttcgacgaccaggcctcggtcacaacggacgtgacatgctgctttttttaattttatttttttatgaaaagaaccagtgtcaatccgcagaccctctgtgaagccaggccggccgggccgagccagcagcccctctccctagactcagaggcgccgcggggaggggtggccccgccgaggcttcaggggccccctccccaccaaagggttcacctcacacttgaatgtacaacccaccccactgtcgggaaggcctccgtcctcggcccctgcctcttgctgctgtcctgtccccgagcccctgcaggtccccccccgcccccccactcaagagttagagcaggtggctgcaggccttgggcccggagggaaggccactgccggccacttggggcagacacagacacctcaaggatctgtcacggaaggcgtcctttttccttgtagctaacgttaggcctgagtagctcccctccatccttgtagacgctccagtccctactactgtgacggcatttccatccctcccctgcccgggaagggaccttgcagggacctctccctccaaaaaaagaaaaaaagaaaaagaaagaaaaaataaatgaggaaacgtgttgca

SEQ ID NO: 180 - protein, 608 aa, Homo sapiens
MAAAAAAVGPGAGGAGSAVPGGAGPCATVSVFPGARLLTIGDANGEIQRHAEQQALRLEVRAGPDSAGIALYSHEDVCVFKCSVSRETECSRVGKQSFIITLGCNSVLIQFATPNDFCSFYNILKTCRGHTLERSVFSERTEESSAVQYFQFYGYLSQQQNMMQDYVRTGTYQRAILQNHTDFKDKIVLDVGCGSGILSFFAAQAGARKIYAVEASTMAQHAEVLVKSNNLTDRIVVIPGKVEEVSLPEQVDIIISEPMGYMLFNERMLESYLHAKKYLKPSGNMFPTIGDVHLAPFTDEQLYMEQFTKANFWYQPSFHGVDLSALRGAAVDEYFRQPVVDTFDIRILMAKSVKYTVNFLEAKEGDLHRIEIPFKFHMLHSGLVHGLAFWFDVAFIGSIMTVWLSTAPTEPLTHWYQVRCLFQSPLFAKAGDTLSGTCLLIANKRQSYDISIVAQVDQTGSKSSNLLDLKNPFFRYTGTTPSPPPGSHYTSPSENMWNTGSTYNLSSGMAVAGMPTAYDLSSVIASGSSVGHNNLIPLANTGIVNHTHSRMGSIMSTGIVQGSSGAQGSGGGSTSAHYAVNSQFTMGGPAISMASPMSIPTNTMHYGS

SEQ ID NO: 181 - DNA, 6317 bp, Homo sapiens
  CDS (121)...(2517): PGC-1 alpha
tagtaagacaggtgccttcagttcactctcagtaaggggctggttgcctgcatgagtgtgtgctctgtgtcactgtggattggagttgaaaaagcttgactggcgtcattcaggagctggatggcgtgggacatgtgcaaccaggactctgagtctgtatggagtgacatcgagtgtgctgctctggttggtgaagaccagcctctttgcccagatcttcctgaacttgatctttctgaactagatgtgaacgacttggatacagacagctttctgggtggactcaagtggtgcagtgaccaatcagaaataatatccaatcagtacaacaatgagccttcaaacatatttgagaagatagatgaagagaatgaggcaaacttgctagcagtcctcacagagacactagacagtctccctgtggatgaagacggattgccctcatttgatgcgctgacagatggagacgtgaccactgacaatgaggctagtccttcctccatgcctgacggcacccctccaccccaggaggcagaagagccgtctctacttaagaagctcttactggcaccagccaacactcagctaagttataatgaatgcagtggtctcagtacccagaaccatgcaaatcacaatcacaggatcagaacaaaccctgcaattgttaagactgagaattcatggagcaataaagcgaagagtatttgtcaacagcaaaagccacaaagacgtccctgctcggagcttctcaaatatctgaccacaaacgatgaccctcctcacaccaaacccacagagaacagaaacagcagcagagacaaatgcacctccaaaaagaagtcccacacacagtcgcagtcacaacacttacaagccaaaccaacaactttatctcttcctctgaccccagagtcaccaaatgaccccaagggttccccatttgagaacaagactattgaacgcaccttaagtgtggaactctctggaactgcaggcctaactccacccaccactcctcctcataaagccaaccaagataacccttttagggcttctccaaagctgaagtcctcttgcaagactgtggtgccaccaccatcaaagaagcccaggtacagtgagtcttctggtacacaaggcaataactccaccaagaaagggccggagcaatccgagttgtatgcacaactcagcaagtcctcagtcctcactggtggacacgaggaaaggaagaccaagcggcccagtctgcggctgtttggtgaccatgactattgccagtcaattaattccaaaacagaaatactcattaatatatcacaggagctccaagactctagacaactagaaaataaagatgtctcctctgattggcaggggcagatttgttcttccacagattcagaccagtgctacctgagagagactttggaggcaagcaagcaggtctctccttgcagcacaagaaaacagctccaagaccaggaaatccgagccgagctgaacaagcacttcggtcatcccagtcaagctgtttttgacgacgaagcagacaagaccggtgaactgagggacagtgatttcagtaatgaacaattctccaaactacctatgtttataaattcaggactagccatggatggcctgtttgatgacagcgaagatgaaagtgataaactgagctacccttgggatggcacgcaatcctattcattgttcaatgtgtctccttcttgttcttcttttaactctccatgtagagattctgtgtcaccacccaaatccttattttctcaaagaccccaaaggatgcgctctcgttcaaggtccttttctcgacacaggtcgtgttcccgatcaccatattccaggtcaagatcaaggtctccaggcagtagatcctcttcaagatcctgctattactatgagtcaagccactacagacaccgcacgcaccgaaattctcccttgtatgtgagatcacgttcaagatcgccctacagccgtcggcccaggtatgacagctacgaggaatatcagcacgagaggctgaagagggaagaatatcgcagagagtatgagaagcgagagtctgagagggccaagcaaagggagaggcagaggcagaaggcaattgaagagcgccgtgtgatttatgtcggtaaaatcagacctgacacaacacggacagaactgagggaccgttttgaagtttttggtgaaattgaggagtgcacagtaaatctgcgggatgatggagacagctatggtttcattacctaccgttatacctgtgatgcttttgctgctcttgaaaatggatacactttgcgcaggtcaaacgaaactgactttgagctgtacttttgtggacgcaagcaatttttcaagtctaactatgcagacctagattcaaactcagatgactttgaccctgcttccaccaagagcaagtatgactctctggattttgatagtttactgaaagaagctcagagaagcttgcgcaggtaacatgttccctagctgaggatgacagagggatggcgaatacctcatgggacagcgcgtccttccctaaagactattgcaagtcatacttaggaatttctcctactttacactctctgtacaaaaacaaaacaaaacaacaacaatacaacaagaacaacaacaacaataacaacaatggtttacatgaacacagctgctgaagaggcaagagacagaatgatatccagtaagcacatgtttattcatgggtgtcagctttgcttttcctggagtctcttggtgatggagtgtgcgtgtgtgcatgtatgtgtgtgtgtatgtatgtgtgtggtgtgtgtgcttggtttaggggaagtatgtgtgggtacatgtgaggactgggggcacctgaccagaatgcgcaagggcaaaccatttcaaatggcagcagttccatgaagacacgcttaaaacctagaacttcaaaatgttcgtattctattcaaaaggaaatatatatatatatatatatatatatatatatatatataaattaaaaaggaaagaaaactaacaaccaaccaaccaaccaaccaaccacaaaccaccctaaaatgacagccgctgatgtctgggcatcagcctttgtactctgtttttttaagaaagtgcagaatcaacttgaagcaagctttctctcataacgtaatgattatatgacaatcctgaagaaaccacaggttccatagaactaatatcctgtctctctctctctctctctctctctcttttttttttctttttccttttgccatggaatctgggtgggagaggatactgcgggcaccagaatgctaaagtttcctaacattttgaagtttctgtagttcatccttaatcctgacacccatgtaaatgtccaaaatgttgatcttccactgcaaatttcaaaagccttgtcaatggtcaagcgtgcagcttgttcagcggttctttctgaggagcggacaccgggttacattactaatgagagttgggtagaactctctgagatgtgttcagatagtgtaattgctacattctctgatgtagttaagtatttacagatgttaaatggagtatttttattttatgtatatactatacaacaatgttcttttttgttacagctatgcactgtaaatgcagccttcttttcaaaactgctaaatttttcttaatcaagaatattcaaatgtaattatgaggtgaaacaattattgtacactaacatatttagaagctgaacttactgcttatatatatttgattgtaaaaacaaaaagacagtgtgtgtgtctgttgagtgcaacaagagcaaaatgatgctttccgcacatccatcccttaggtgagcttcaatctaagcatcttgtcaagaaatatcctagtcccctaaaggtattaaccacttctgcgatatttttccacattttcttgtcgcttgtttttctttgaagttttatacactggatttgttaggggaatgaaattttctcatctaaaatttttctagaagatatcatgattttatgtaaagtctctcaatgggtaaccattaagaaatgtttttattttctctatcaacagtagttttgaaactagaagtcaaaaatctttttaaaatgctgttttgttttaatttttgtgattttaatttgatacaaaatgctgaggtaataattatagtatgatttttacaataattaatgtgtgtctgaagactatctttgaagccagtatttctttcccttggcagagtatgacgatggtatttatctgtattttttacagttatgcatcctgtataaatactgatatttcattcctttgtttactaaagagacatatttatcagttgcagatagcctatttattataaattatgagatgatgaaaataataaagccagtggaaattttctacctaggatgcatgacaattgtcaggttggagtgtaagtgcttcatttgggaaattcagcttttgcagaagcagtgtttctacttgcactagcatggcctctgacgtgaccatggtgttgttcttgatgacattgcttctgctaaatttaataaaaacttcagaaaaacctccattttgatcatcaggatttcatctgagtgtggagtccctggaatggaattcagtaacatttggagtgtgtattcaagtttctaaattgagattcgattactgtttggctgacatgacttttctggaagacatgatacacctactactcaattgttcttttcctttctctcgcccaacacgatcttgtaagatggatttcacccccaggccaatgcagctaattttgatagctgcattcatttatcaccagcatattgtgttctgagtgaatccactgtttgtcctgtcggatgcttgcttgattttttggcttcttatttctaagtagatagaaagcaataaaaatactatgaaatgaaagaacttgttcacaggttctgcgttacaacagtaacacatctttaatccgcctaattcttgttgttctgtaggttaaatgcaggtattttaactgtgtgaacgccaaactaaagtttacagtctttctttctgaattttgagtatcttctgttgtagaataataataaaaagactattaagagcaataaattatttttaagaaatcgagatttagtaaatcctattatgtgttcaaggaccacatgtgttctctattttgcctttaaatttttgtgaaccaattttaaatacattctcctttttgccctggattgttgacatgagtggaatacttggtttcttttcttacttatcaaaagacagcactacagatatcatattgaggattaatttatcccccctacccccagcctgacaaatattgttaccatgaagatagttttcctcaatggacttcaaattgcatctagaattagtggagcttttgtatcttctgcagacactgtgggtagcccatcaaaatgtaagctgtgctcctctcatttttatttttatttttttgggagagaatatttcaaatgaacacgtgcaccccatcatcactggaggcaaatttcagcatagatctgtaggatttttagaagaccgtgggccattgccttcatgccgtggtaagtaccacatctacaattttggtaaccgaactggtgctttagtaatgtggatttttttcttttttaaaagagatgtagcagaataattcttccagtgcaacaaaatcaattttttgctaaacgactccgagaacaacagttgggctgtcaacattcaaagcagcagagagggaactttgcactattggggtatgatgtttgggtcagttgataaaaggaaaccttttcatgcctttagatgtgagcttccagtaggtaatgattatgtgtcctttcttgatggctgtaatgagaacttcaatcactgtagtctaagacctgatctatagatgacctagaatagccatgtactataatgtgatgattctaaatttgtacctatgtgacagacattttcaataatgtgaactgctgatttgatggagctactttaagatttgtaggtgaaagtgtaatactgttggttgaactatgctgaagagggaaagtgagcgattagttgagcccttgccgggccttttttccacctgccaattctacatgtattgttgtggttttattcattgtatgaaaattcctgtgattttttttaaatgtgcagtacacatcagcctcactgagctaataaagggaaacgaatgtttcaaatct

SEQ ID NO: 182 - protein, 798 aa, Homo sapiens
MAWDMCNQDSESVWSDIECAALVGEDQPLCPDLPELDLSELDVNDLDTDSFLGGLKWCSDQSEIISNQYNNEPSNIFEKIDEENEANLLAVLTETLDSLPVDEDGLPSFDALTDGDVTTDNEASPSSMPDGTPPPQEAEEPSLLKKLLLAPANTQLSYNECSGLSTQNHANHNHRIRTNPAIVKTENSWSNKAKSICQQQKPQRRPCSELLKYLTTNDDPPHTKPTENRNSSRDKCTSKKKSHTQSQSQHLQAKPTTLSLPLTPESPNDPKGSPFENKTIERTLSVELSGTAGLTPPTTPPHKANQDNPFRASPKLKSSCKTVVPPPSKKPRYSESSGTQGNNSTKKGPEQSELYAQLSKSSVLTGGHEERKTKRPSLRLFGDHDYCQSINSKTEILINISQELQDSRQLENKDVSSDWQGQICSSTDSDQCYLRETLEASKQVSPCSTRKQLQDQEIRAELNKHFGHPSQAVFDDEADKTGELRDSDFSNEQFSKLPMFINSGLAMDGLFDDSEDESDKLSYPWDGTQSYSLFNVSPSCSSFNSPCRDSVSPPKSLFSQRPQRMRSRSRSFSRHRSCSRSPYSRSRSRSPGSRSSSRSCYYYESSHYRHRTHRNSPLYVRSRSRSPYSRRPRYDSYEEYQHERLKREEYRREYEKRESERAKQRERQRQKAIEERRVIYVGKIRPDTTRTELRDRFEVFGEIEECTVNLRDDGDSYGFITYRYTCDAFAALENGYTLRRSNETDFELYFCGRKQFFKSNYADLDSNSDDFDPASTKSKYDSLDFDSLLKEAQRSLRR

SEQ ID NO: 183 - DNA, 3277 bp, Homo sapiens
  CDS (43)...(3114): PGC-1 beta
ctcggcgttgactccgccgcacgctgcagccgcggctggaagatggcggggaacgactgcggcgcgctgctggacgaagagctctcctccttcttcctcaactatctcgctgacacgcagggtggagggtccggggaggagcaactctatgctgactttccagaacttgacctctcccagctggatgccagcgactttgactcggccacctgctttggggagctgcagtggtgcccagagaactcagagactgaacccaaccagtacagccccgatgactccgagctcttccagattgacagtgagaatgaggccctcctggcagagctcaccaagaccctggatgacatccctgaagatgacgtgggtctggctgccttcccagccctggatggtggagacgctctatcatgcacctcagcttcgcctgccccctcatctgcaccccccagccctgccccggagaagccctcggccccagcccctgaggtggacgagctctcactgctgcagaagctcctcctggccacatcctacccaacatcaagctctgacacccagaaggaagggaccgcctggcgccaggcaggcctcagatctaaaagtcaacggccttgtgttaaggcggacagcacccaagacaagaaggctcccatgatgcagtctcagagccgaagttgtacagaactacataagcacctcacctcggcacagtgctgcctgcaggatcggggtctgcagccaccatgcctccagagtccccggctccctgccaaggaggacaaggagccgggtgaggactgcccgagcccccagccagctccagcctctccccaggactccctagctctgggcagggcagaccccggtgccccggtttcccaggaagacatgcaggcgatggtgcaactcatacgctacatgcacacctactgcctcccccagaggaagctgcccccacagacccctgagccactccccaaggcctgcagcaacccctcccagcaggtcagatcccggccctggtcccggcaccactccaaagcctcctgggctgagttctccattctgagggaacttctggctcaagacgtgctctgtgatgtcagcaaaccctaccgtctggccacgcctgtttatgcctccctcacacctcggtcaaggcccaggccccccaaagacagtcaggcctcccctggtcgcccgtcctcggtggaggaggtaaggatcgcagcttcacccaagagcaccgggcccagaccaagcctgcgcccactgcggctggaggtgaaaagggaggtccgccggcctgccagactgcagcagcaggaggaggaagacgaggaagaagaggaggaggaagaggaagaagaaaaagaggaggaggaggagtggggcaggaaaaggccaggccgaggcctgccatggacgaagctggggaggaagctggagagctctgtgtgccccgtgcggcgttctcggagactgaaccctgagctgggcccctggctgacatttgcagatgagccgctggtcccctcggagccccaaggtgctctgccctcactgtgcctggctcccaaggcctacgacgtagagcgggagctgggcagccccacggacgaggacagtggccaagaccagcagctcctacggggaccccagatccctgccctggagagcccctgtgagagtgggtgtggggacatggatgaggaccccagctgcccgcagctccctcccagagactctcccaggtgcctcatgctggccttgtcacaaagcgacccaacttttggcaagaagagctttgagcagaccttgacagtggagctctgtggcacagcaggactcaccccacccaccacaccaccgtacaagcccacagaggaggatcccttcaaaccagacatcaagcatagtctaggcaaagaaatagctctcagcctcccctcccctgagggcctctcactcaaggccaccccaggggctgcccacaagctgccaaagaagcacccagagcgaagtgagctcctgtcccacctgcgacatgccacagcccagccagcctcccaggctggccagaagcgtcccttctcctgttcctttggagaccatgactactgccaggtgctccgaccagaaggcgtcctgcaaaggaaggtgctgaggtcctgggagccgtctggggttcaccttgaggactggccccagcagggtgccccttgggctgaggcacaggcccctggcagggaggaagacagaagctgtgatgctggtgccccacccaaggacagcacgctgctgagagaccatgagatccgtgctagcctcaccaaacactttgggctgctggagaccgccctggaggaggaagacctggcctcctgcaagagccctgagtatgacactgtctttgaagacagcagcagcagcagcggcgagagcagcttcctcccagaggaggaagaggaagaaggggaggaggaggaggaggacgatgaagaagaggactcaggggtcagccccacttgctctgaccactgcccctaccagagcccaccaagcaaggccaaccggcagctctgttcccgcagccgctcaagctctggctcttcaccctgccactcctggtcaccagccactcgaaggaacttcagatgtgagagcagagggccgtgttcagacagaacgccaagcatccggcacgccaggaagcggcgggaaaaggccattggggaaggccgcgtggtgtacattcaaaatctctccagcgacatgagctcccgagagctgaagaggcgctttgaagtgtttggtgagattgaggagtgcgaggtgctgacaagaaataggagaggcgagaagtacggcttcatcacctaccggtgttctgagcacgcggccctctctttgacaaagggcgctgccctgaggaagcgcaacgagccctccttccagctgagctacggagggctccggcacttctgctggcccagatacactgactacgattccaattcagaagaggcccttcctgcgtcagggaaaagcaagtatgaagccatggattttgacagcttactgaaagaggcccagcagagcctgcattgataacagccttaaccctcgaggaatacctcaatacctcagacaaggcccttccaatatgtttacgttttcaaagaaatcaagtatatgaggagagcgagcgagcgtgagagaacacccgtgagagagacttgaaactgctgtcctttaaaaaaaaaaaaaaaaa

SEQ ID NO: 184 - protein, 1023 aa, Homo sapiens
MAGNDCGALLDEELSSFFLNYLADTQGGGSGEEQLYADFPELDLSQLDASDFDSATCFGELQWCPENSETEPNQYSPDDSELFQIDSENEALLAELTKTLDDIPEDDVGLAAFPALDGGDALSCTSASPAPSSAPPSPAPEKPSAPAPEVDELSLLQKLLLATSYPTSSSDTQKEGTAWRQAGLRSKSQRPCVKADSTQDKKAPMMQSQSRSCTELHKHLTSAQCCLQDRGLQPPCLQSPRLPAKEDKEPGEDCPSPQPAPASPQDSLALGRADPGAPVSQEDMQAMVQLIRYMHTYCLPQRKLPPQTPEPLPKACSNPSQQVRSRPWSRHHSKASWAEFSILRELLAQDVLCDVSKPYRLATPVYASLTPRSRPRPPKDSQASPGRPSSVEEVRIAASPKSTGPRPSLRPLRLEVKREVRRPARLQQQEEEDEEEEEEEEEEEKEEEEEWGRKRPGRGLPWTKLGRKLESSVCPVRRSRRLNPELGPWLTFADEPLVPSEPQGALPSLCLAPKAYDVERELGSPTDEDSGQDQQLLRGPQIPALESPCESGCGDMDEDPSCPQLPPRDSPRCLMLALSQSDPTFGKKSFEQTLTVELCGTAGLTPPTTPPYKPTEEDPFKPDIKHSLGKEIALSLPSPEGLSLKATPGAAHKLPKKHPERSELLSHLRHATAQPASQAGQKRPFSCSFGDHDYCQVLRPEGVLQRKVLRSWEPSGVHLEDWPQQGAPWAEAQAPGREEDRSCDAGAPPKDSTLLRDHEIRASLTKHFGLLETALEEEDLASCKSPEYDTVFEDSSSSSGESSFLPEEEEEEGEEEEEDDEEEDSGVSPTCSDHCPYQSPPSKANRQLCSRSRSSSGSSPCHSWSPATRRNFRCESRGPCSDRTPSIRHARKRREKAIGEGRVVYIQNLSSDMSSRELKRRFEVFGEIEECEVLTRNRRGEKYGFITYRCSEHAALSLTKGAALRKRNEPSFQLSYGGLRHFCWPRYTDYDSNSEEALPASGKSKYEAMDFDSLLKEAQQSLH

SEQ ID NO: 185 - DNA, 3186 bp, Homo sapiens
  CDS (151)...(3186): HDAC9 variant 1
ggggaagagaggcacagacacagataggagaagggcaccggctggagccacttgcaggactgagggtttttgcaacaaaaccctagcagcctgaagaactctaagccagatggggtggctggacgagagcagctcttggctcagcaaagaatgcacagtatgatcagctcagtggatgtgaagtcagaagttcctgtgggcctggagcccatctcacctttagacctaaggacagacctcaggatgatgatgcccgtggtggaccctgttgtccgtgagaagcaattgcagcaggaattacttcttatccagcagcagcaacaaatccagaagcagcttctgatagcagagtttcagaaacagcatgagaacttgacacggcagcaccaggctcagcttcaggagcatatcaaggaacttctagccataaaacagcaacaagaactcctagaaaaggagcagaaactggagcagcagaggcaagaacaggaagtagagaggcatcgcagagaacagcagcttcctcctctcagaggcaaagatagaggacgagaaagggcagtggcaagtacagaagtaaagcagaagcttcaagagttcctactgagtaaatcagcaacgaaagacactccaactaatggaaaaaatcattccgtgagccgccatcccaagctctggtacacggctgcccaccacacatcattggatcaaagctctccaccccttagtggaacatctccatcctacaagtacacattaccaggagcacaagatgcaaaggatgatttcccccttcgaaaaactgcctctgagcccaacttgaaggtgcggtccaggttaaaacagaaagtggcagagaggagaagcagccccttactcaggcggaaggatggaaatgttgtcacttcattcaagaagcgaatgtttgaggtgacagaatcctcagtcagtagcagttctccaggctctggtcccagttcaccaaacaatgggccaactggaagtgttactgaaaatgagacttcggttttgccccctacccctcatgccgagcaaatggtttcacagcaacgcattctaattcatgaagattccatgaacctgctaagtctttatacctctccttctttgcccaacattaccttggggcttcccgcagtgccatcccagctcaatgcttcgaattcactcaaagaaaagcagaagtgtgagacgcagacgcttaggcaaggtgttcctctgcctgggcagtatggaggcagcatcccggcatcttccagccaccctcatgttactttagagggaaagccacccaacagcagccaccaggctctcctgcagcatttattattgaaagaacaaatgcgacagcaaaagcttcttgtagctggtggagttcccttacatcctcagtctcccttggcaacaaaagagagaatttcacctggcattagaggtacccacaaattgccccgtcacagacccctgaaccgaacccagtctgcacctttgcctcagagcacgttggctcagctggtcattcaacagcaacaccagcaattcttggagaagcagaagcaataccagcagcagatccacatgaacaaactgctttcgaaatctattgaacaactgaagcaaccaggcagtcaccttgaggaagcagaggaagagcttcagggggaccaggcgatgcaggaagacagagcgccctctagtggcaacagcactaggagcgacagcagtgcttgtgtggatgacacactgggacaagttggggctgtgaaggtcaaggaggaaccagtggacagtgatgaagatgctcagatccaggaaatggaatctggggagcaggctgcttttatgcaacagcctttcctggaacccacgcacacacgtgcgctctctgtgcgccaagctccgctggctgcggttggcatggatggattagagaaacaccgtctcgtctccaggactcactcttcccctgctgcctctgttttacctcacccagcaatggaccgccccctccagcctggctctgcaactggaattgcctatgaccccttgatgctgaaacaccagtgcgtttgtggcaattccaccacccaccctgagcatgctggacgaatacagagtatctggtcacgactgcaagaaactgggctgctaaataaatgtgagcgaattcaaggtcgaaaagccagcctggaggaaatacagcttgttcattctgaacatcactcactgttgtatggcaccaaccccctggacggacagaagctggaccccaggatactcctaggtgatgactctcaaaagtttttttcctcattaccttgtggtggacttggggtggacagtgacaccatttggaatgagctacactcgtccggtgctgcacgcatggctgttggctgtgtcatcgagctggcttccaaagtggcctcaggagagctgaagaatgggtttgctgttgtgaggccccctggccatcacgctgaagaatccacagccatggggttctgcttttttaattcagttgcaattaccgccaaatacttgagagaccaactaaatataagcaagatattgattgtagatctggatgttcaccatggaaacggtacccagcaggccttttatgctgaccccagcatcctgtacatttcactccatcgctatgatgaagggaactttttccctggcagtggagccccaaatgaggttggaacaggccttggagaagggtacaatataaatattgcctggacaggtggccttgatcctcccatgggagatgttgagtaccttgaagcattcaggaccatcgtgaagcctgtggccaaagagtttgatccagacatggtcttagtatctgctggatttgatgcattggaaggccacacccctcctctaggagggtacaaagtgacggcaaaatgttttggtcatttgacgaagcaattgatgacattggctgatggacgtgtggtgttggctctagaaggaggacatgatctcacagccatctgtgatgcatcagaagcctgtgtaaatgcccttctaggaaatgagctggagccacttgcagaagatattctccaccaaagcccgaatatgaatgctgttatttctttacagaagatcattgaaattcaaagtatgtctttaaagttctcttaa

SEQ ID NO: 186 - protein, 1011 aa, Homo sapiens
MHSMISSVDVKSEVPVGLEPISPLDLRTDLRMMMPVVDPVVREKQLQQELLLIQQQQQIQKQLLIAEFQKQHENLTRQHQAQLQEHIKELLAIKQQQELLEKEQKLEQQRQEQEVERHRREQQLPPLRGKDRGRERAVASTEVKQKLQEFLLSKSATKDTPTNGKNHSVSRHPKLWYTAAHHTSLDQSSPPLSGTSPSYKYTLPGAQDAKDDFPLRKTASEPNLKVRSRLKQKVAERRSSPLLRRKDGNVVTSFKKRMFEVTESSVSSSSPGSGPSSPNNGPTGSVTENETSVLPPTPHAEQMVSQQRILIHEDSMNLLSLYTSPSLPNITLGLPAVPSQLNASNSLKEKQKCETQTLRQGVPLPGQYGGSIPASSSHPHVTLEGKPPNSSHQALLQHLLLKEQMRQQKLLVAGGVPLHPQSPLATKERISPGIRGTHKLPRHRPLNRTQSAPLPQSTLAQLVIQQQHQQFLEKQKQYQQQIHMNKLLSKSIEQLKQPGSHLEEAEEELQGDQAMQEDRAPSSGNSTRSDSSACVDDTLGQVGAVKVKEEPVDSDEDAQIQEMESGEQAAFMQQPFLEPTHTRALSVRQAPLAAVGMDGLEKHRLVSRTHSSPAASVLPHPAMDRPLQPGSATGIAYDPLMLKHQCVCGNSTTHPEHAGRIQSIWSRLQETGLLNKCERIQGRKASLEEIQLVHSEHHSLLYGTNPLDGQKLDPRILLGDDSQKFFSSLPCGGLGVDSDTIWNELHSSGAARMAVGCVIELASKVASGELKNGFAVVRPPGHHAEESTAMGFCFFNSVAITAKYLRDQLNISKILIVDLDVHHGNGTQQAFYADPSILYISLHRYDEGNFFPGSGAPNEVGTGLGEGYNINIAWTGGLDPPMGDVEYLEAFRTIVKPVAKEFDPDMVLVSAGFDALEGHTPPLGGYKVTAKCFGHLTKQLMTLADGRVVLALEGGHDLTAICDASEACVNALLGNELEPLAEDILHQSPNMNAVISLQKIIEIQSMSLKFS

SEQ ID NO: 187 - DNA, 2790 bp, Homo sapiens
  CDS (151)...(2790): HDAC9 variant 2
ggggaagagaggcacagacacagataggagaagggcaccggctggagccacttgcaggactgagggtttttgcaacaaaaccctagcagcctgaagaactctaagccagatggggtggctggacgagagcagctcttggctcagcaaagaatgcacagtatgatcagctcagtggatgtgaagtcagaagttcctgtgggcctggagcccatctcacctttagacctaaggacagacctcaggatgatgatgcccgtggtggaccctgttgtccgtgagaagcaattgcagcaggaattacttcttatccagcagcagcaacaaatccagaagcagcttctgatagcagagtttcagaaacagcatgagaacttgacacggcagcaccaggctcagcttcaggagcatatcaaggaacttctagccataaaacagcaacaagaactcctagaaaaggagcagaaactggagcagcagaggcaagaacaggaagtagagaggcatcgcagagaacagcagcttcctcctctcagaggcaaagatagaggacgagaaagggcagtggcaagtacagaagtaaagcagaagcttcaagagttcctactgagtaaatcagcaacgaaagacactccaactaatggaaaaaatcattccgtgagccgccatcccaagctctggtacacggctgcccaccacacatcattggatcaaagctctccaccccttagtggaacatctccatcctacaagtacacattaccaggagcacaagatgcaaaggatgatttcccccttcgaaaaactgcctctgagcccaacttgaaggtgcggtccaggttaaaacagaaagtggcagagaggagaagcagccccttactcaggcggaaggatggaaatgttgtcacttcattcaagaagcgaatgtttgaggtgacagaatcctcagtcagtagcagttctccaggctctggtcccagttcaccaaacaatgggccaactggaagtgttactgaaaatgagacttcggttttgccccctacccctcatgccgagcaaatggtttcacagcaacgcattctaattcatgaagattccatgaacctgctaagtctttatacctctccttctttgcccaacattaccttggggcttcccgcagtgccatcccagctcaatgcttcgaattcactcaaagaaaagcagaagtgtgagacgcagacgcttaggcaaggtgttcctctgcctgggcagtatggaggcagcatcccggcatcttccagccaccctcatgttactttagagggaaagccacccaacagcagccaccaggctctcctgcagcatttattattgaaagaacaaatgcgacagcaaaagcttcttgtagctggtggagttcccttacatcctcagtctcccttggcaacaaaagagagaatttcacctggcattagaggtacccacaaattgccccgtcacagacccctgaaccgaacccagtctgcacctttgcctcagagcacgttggctcagctggtcattcaacagcaacaccagcaattcttggagaagcagaagcaataccagcagcagatccacatgaacaaactgctttcgaaatctattgaacaactgaagcaaccaggcagtcaccttgaggaagcagaggaagagcttcagggggaccaggcgatgcaggaagacagagcgccctctagtggcaacagcactaggagcgacagcagtgcttgtgtggatgacacactgggacaagttggggctgtgaaggtcaaggaggaaccagtggacagtgatgaagatgctcagatccaggaaatggaatctggggagcaggctgcttttatgcaacagcctttcctggaacccacgcacacacgtgcgctctctgtgcgccaagctccgctggctgcggttggcatggatggattagagaaacaccgtctcgtctccaggactcactcttcccctgctgcctctgttttacctcacccagcaatggaccgccccctccagcctggctctgcaactggaattgcctatgaccccttgatgctgaaacaccagtgcgtttgtggcaattccaccacccaccctgagcatgctggacgaatacagagtatctggtcacgactgcaagaaactgggctgctaaataaatgtgagcgaattcaaggtcgaaaagccagcctggaggaaatacagcttgttcattctgaacatcactcactgttgtatggcaccaaccccctggacggacagaagctggaccccaggatactcctaggtgatgactctcaaaagtttttttcctcattaccttgtggtggacttggggtggacagtgacaccatttggaatgagctacactcgtccggtgctgcacgcatggctgttggctgtgtcatcgagctggcttccaaagtggcctcaggagagctgaagaatgggtttgctgttgtgaggccccctggccatcacgctgaagaatccacagccatggggttctgcttttttaattcagttgcaattaccgccaaatacttgagagaccaactaaatataagcaagatattgattgtagatctggatgttcaccatggaaacggtacccagcaggccttttatgctgaccccagcatcctgtacatttcactccatcgctatgatgaagggaactttttccctggcagtggagccccaaatgaggttcggtttatttctttagagccccacttttatttgtatctttcaggtaattgcattgcatga

SEQ ID NO: 188 - protein, 879 aa, Homo sapiens
MHSMISSVDVKSEVPVGLEPISPLDLRTDLRMMMPVVDPVVREKQLQQELLLIQQQQQIQKQLLIAEFQKQHENLTRQHQAQLQEHIKELLAIKQQQELLEKEQKLEQQRQEQEVERHRREQQLPPLRGKDRGRERAVASTEVKQKLQEFLLSKSATKDTPTNGKNHSVSRHPKLWYTAAHHTSLDQSSPPLSGTSPSYKYTLPGAQDAKDDFPLRKTASEPNLKVRSRLKQKVAERRSSPLLRRKDGNVVTSFKKRMFEVTESSVSSSSPGSGPSSPNNGPTGSVTENETSVLPPTPHAEQMVSQQRILIHEDSMNLLSLYTSPSLPNITLGLPAVPSQLNASNSLKEKQKCETQTLRQGVPLPGQYGGSIPASSSHPHVTLEGKPPNSSHQALLQHLLLKEQMRQQKLLVAGGVPLHPQSPLATKERISPGIRGTHKLPRHRPLNRTQSAPLPQSTLAQLVIQQQHQQFLEKQKQYQQQIHMNKLLSKSIEQLKQPGSHLEEAEEELQGDQAMQEDRAPSSGNSTRSDSSACVDDTLGQVGAVKVKEEPVDSDEDAQIQEMESGEQAAFMQQPFLEPTHTRALSVRQAPLAAVGMDGLEKHRLVSRTHSSPAASVLPHPAMDRPLQPGSATGIAYDPLMLKHQCVCGNSTTHPEHAGRIQSIWSRLQETGLLNKCERIQGRKASLEEIQLVHSEHHSLLYGTNPLDGQKLDPRILLGDDSQKFFSSLPCGGLGVDSDTIWNELHSSGAARMAVGCVIELASKVASGELKNGFAVVRPPGHHAEESTAMGFCFFNSVAITAKYLRDQLNISKILIVDLDVHHGNGTQQAFYADPSILYISLHRYDEGNFFPGSGAPNEVRFISLEPHFYLYLSGNCIA

SEQ ID NO: 189 - DNA, 4238 bp, Homo sapiens
  CDS (151)...(1923): HDAC9 variant 3
ggggaagagaggcacagacacagataggagaagggcaccggctggagccacttgcaggactgagggtttttgcaacaaaaccctagcagcctgaagaactctaagccagatggggtggctggacgagagcagctcttggctcagcaaagaatgcacagtatgatcagctcagtggatgtgaagtcagaagttcctgtgggcctggagcccatctcacctttagacctaaggacagacctcaggatgatgatgcccgtggtggaccctgttgtccgtgagaagcaattgcagcaggaattacttcttatccagcagcagcaacaaatccagaagcagcttctgatagcagagtttcagaaacagcatgagaacttgacacggcagcaccaggctcagcttcaggagcatatcaaggaacttctagccataaaacagcaacaagaactcctagaaaaggagcagaaactggagcagcagaggcaagaacaggaagtagagaggcatcgcagagaacagcagcttcctcctctcagaggcaaagatagaggacgagaaagggcagtggcaagtacagaagtaaagcagaagcttcaagagttcctactgagtaaatcagcaacgaaagacactccaactaatggaaaaaatcattccgtgagccgccatcccaagctctggtacacggctgcccaccacacatcattggatcaaagctctccaccccttagtggaacatctccatcctacaagtacacattaccaggagcacaagatgcaaaggatgatttcccccttcgaaaaactgcctctgagcccaacttgaaggtgcggtccaggttaaaacagaaagtggcagagaggagaagcagccccttactcaggcggaaggatggaaatgttgtcacttcattcaagaagcgaatgtttgaggtgacagaatcctcagtcagtagcagttctccaggctctggtcccagttcaccaaacaatgggccaactggaagtgttactgaaaatgagacttcggttttgccccctacccctcatgccgagcaaatggtttcacagcaacgcattctaattcatgaagattccatgaacctgctaagtctttatacctctccttctttgcccaacattaccttggggcttcccgcagtgccatcccagctcaatgcttcgaattcactcaaagaaaagcagaagtgtgagacgcagacgcttaggcaaggtgttcctctgcctgggcagtatggaggcagcatcccggcatcttccagccaccctcatgttactttagagggaaagccacccaacagcagccaccaggctctcctgcagcatttattattgaaagaacaaatgcgacagcaaaagcttcttgtagctggtggagttcccttacatcctcagtctcccttggcaacaaaagagagaatttcacctggcattagaggtacccacaaattgccccgtcacagacccctgaaccgaacccagtctgcacctttgcctcagagcacgttggctcagctggtcattcaacagcaacaccagcaattcttggagaagcagaagcaataccagcagcagatccacatgaacaaactgctttcgaaatctattgaacaactgaagcaaccaggcagtcaccttgaggaagcagaggaagagcttcagggggaccaggcgatgcaggaagacagagcgccctctagtggcaacagcactaggagcgacagcagtgcttgtgtggatgacacactgggacaagttggggctgtgaaggtcaaggaggaaccagtggacagtgatgaagatgctcagatccaggaaatggaatctggggagcaggctgcttttatgcaacaggtaataggcaaagatttagctccaggatttgtaattaaagtcattatctgaacatgaaatgcattgcaggtttggtaaatggatatgatttcctatcagtttatatttctctatgatttgagttcagtgtttaaggattctacctaatgcagatatatgtatatatctatatagaggtctttctatatactgatctctatatagatatcaatgtttcattgaaaatccactggtaaggaaatacctgttatactaaaattatgatacataatatctgagcagttaataggctttaaatttatcccaaagcctgctacaccaattacttctaaagaaaacaaattcactgttattttgagtttatgtgttgagatcagtgactgctggatagtctcccagtctgatcaatgaagcattcgattagtttttgattttttgcaacatctagaatttaattttcacatcactgtacataatgtatcatactatagtcttgaacactgttaaaggtagtctgccccttccttcctctctctttttttagttaagtagaaatgttctggtcaccatgccagtagtcctaggttattgtgtaggttgcaattgaacatattaggaatacaggtggttttaaatatatagatgcaaattgcagcactactttaaatattagattatgtctcacatagcactgctcattttacttttattttgtgtaatttgatgacactgtctatcaaaaaagagcaaatgaagcagatgcaaatgttagtgagaagtaatgtgcagcattatggtccaatcagatacaatattgtgtctacaattgcaaaaaacacagtaacaggatgaatattatctgatatcaagtcaaaatcagtttgaaaagaaggtgtatcatattttatattgtcactagaatctcttaagtataattccataatgacatgggcatataccgtaacattctggcaaataacaattagaaaagataggtttaacaaaaaaatttacttgtatataatgcaccttcaggaggactatgtcctttgatgctataaaatacaaacaactttgaaggcaacagaagacactgtttattcaagtcagttctttgtcaggttcctgctgttctcctacagaaaagtgattctgtgagggtgaacaggaaatgccttgtggaaacaggaagtccaagtgattcatgtactgaggaatgtaggaaaaaaaatctgaggatagtgctttactctttctgtttttaaagggcactctatgaattgatttattgtctaagaaaataacaccacaagtagggaaattgttacggaagcttttcactggaacatttccttcatattcccttttgatatgtttaccttgttttataggtttacttttgttaagctagttaaaggttcgttgtattaagacccctttaatatggataatccaaattgacctagaatctttgtgaggttttttctattaaaatatttatatttctaaatccgaggtatttcaaggtgtagtatcctatttcaaaggagatatagcagttttgccaaatgtagacattgttcaactgtatgttattggcacgtgttgtttacattttgctgtgacatttaaaaatatttctttaaaaatgttactgctaaagatacattatccttttttaaaaagtctccattcaaattaaattaacataactagaagttagaaagtttaaaagttttccacataatgaaagtccttctgataatttgacaaatagctataataggaacactccctatcaccaacatattttggttagtatattccttcatattaaaatgactttttgtcagttgttttgcattaaaaatatggcatgcctaagataaaattgtatattttttccatctcataaatattcattttcttcaaagtcttttttcaatctcataaaaaagggatagtgcatcttttaaaatacattttatttggggaggaacatgtggctgagcagacttttgtataatattacttcaaagatatgtaatcacaaacaaaaaaaactattttttataatgtcatttgagagagtttcatcagtacagttggtggacgttaattgtttgaatttgatagtctttgaatttaatcaagaaactacctggaaccagtgaaaaggaaagctggacttaaataatcttagaattaattgataaatgtctcttttaaaatctactgtatttattataatttacacccttgaaggtgatctcttgttttgtgttgtaaatatattgtttgtatgtttcccttcttgccttctgttataagtctcttcctttctcaaataaagttttttttaaaag

SEQ ID NO: 190 - protein, 590 aa, Homo sapiens
MHSMISSVDVKSEVPVGLEPISPLDLRTDLRMMMPVVDPVVREKQLQQELLLIQQQQQIQKQLLIAEFQKQHENLTRQHQAQLQEHIKELLAIKQQQELLEKEQKLEQQRQEQEVERHRREQQLPPLRGKDRGRERAVASTEVKQKLQEFLLSKSATKDTPTNGKNHSVSRHPKLWYTAAHHTSLDQSSPPLSGTSPSYKYTLPGAQDAKDDFPLRKTASEPNLKVRSRLKQKVAERRSSPLLRRKDGNVVTSFKKRMFEVTESSVSSSSPGSGPSSPNNGPTGSVTENETSVLPPTPHAEQMVSQQRILIHEDSMNLLSLYTSPSLPNITLGLPAVPSQLNASNSLKEKQKCETQTLRQGVPLPGQYGGSIPASSSHPHVTLEGKPPNSSHQALLQHLLLKEQMRQQKLLVAGGVPLHPQSPLATKERISPGIRGTHKLPRHRPLNRTQSAPLPQSTLAQLVIQQQHQQFLEKQKQYQQQIHMNKLLSKSIEQLKQPGSHLEEAEEELQGDQAMQEDRAPSSGNSTRSDSSACVDDTLGQVGAVKVKEEPVDSDEDAQIQEMESGEQAAFMQQVIGKDLAPGFVIKVII

SEQ ID NO: 191 - DNA, 4659 bp, Homo sapiens
  CDS (151)...(3351): HDAC9 variant 4
ggggaagagaggcacagacacagataggagaagggcaccggctggagccacttgcaggactgagggtttttgcaacaaaaccctagcagcctgaagaactctaagccagatggggtggctggacgagagcagctcttggctcagcaaagaatgcacagtatgatcagctcagtggatgtgaagtcagaagttcctgtgggcctggagcccatctcacctttagacctaaggacagacctcaggatgatgatgcccgtggtggaccctgttgtccgtgagaagcaattgcagcaggaattacttcttatccagcagcagcaacaaatccagaagcagcttctgatagcagagtttcagaaacagcatgagaacttgacacggcagcaccaggctcagcttcaggagcatatcaaggaacttctagccataaaacagcaacaagaactcctagaaaaggagcagaaactggagcagcagaggcaagaacaggaagtagagaggcatcgcagagaacagcagcttcctcctctcagaggcaaagatagaggacgagaaagggcagtggcaagtacagaagtaaagcagaagcttcaagagttcctactgagtaaatcagcaacgaaagacactccaactaatggaaaaaatcattccgtgagccgccatcccaagctctggtacacggctgcccaccacacatcattggatcaaagctctccaccccttagtggaacatctccatcctacaagtacacattaccaggagcacaagatgcaaaggatgatttcccccttcgaaaaactgcctctgagcccaacttgaaggtgcggtccaggttaaaacagaaagtggcagagaggagaagcagccccttactcaggcggaaggatggaaatgttgtcacttcattcaagaagcgaatgtttgaggtgacagaatcctcagtcagtagcagttctccaggctctggtcccagttcaccaaacaatgggccaactggaagtgttactgaaaatgagacttcggttttgccccctacccctcatgccgagcaaatggtttcacagcaacgcattctaattcatgaagattccatgaacctgctaagtctttatacctctccttctttgcccaacattaccttggggcttcccgcagtgccatcccagctcaatgcttcgaattcactcaaagaaaagcagaagtgtgagacgcagacgcttaggcaaggtgttcctctgcctgggcagtatggaggcagcatcccggcatcttccagccaccctcatgttactttagagggaaagccacccaacagcagccaccaggctctcctgcagcatttattattgaaagaacaaatgcgacagcaaaagcttcttgtagctggtggagttcccttacatcctcagtctcccttggcaacaaaagagagaatttcacctggcattagaggtacccacaaattgccccgtcacagacccctgaaccgaacccagtctgcacctttgcctcagagcacgttggctcagctggtcattcaacagcaacaccagcaattcttggagaagcagaagcaataccagcagcagatccacatgaacaaactgctttcgaaatctattgaacaactgaagcaaccaggcagtcaccttgaggaagcagaggaagagcttcagggggaccaggcgatgcaggaagacagagcgccctctagtggcaacagcactaggagcgacagcagtgcttgtgtggatgacacactgggacaagttggggctgtgaaggtcaaggaggaaccagtggacagtgatgaagatgctcagatccaggaaatggaatctggggagcaggctgcttttatgcaacagcctttcctggaacccacgcacacacgtgcgctctctgtgcgccaagctccgctggctgcggttggcatggatggattagagaaacaccgtctcgtctccaggactcactcttcccctgctgcctctgttttacctcacccagcaatggaccgccccctccagcctggctctgcaactggaattgcctatgaccccttgatgctgaaacaccagtgcgtttgtggcaattccaccacccaccctgagcatgctggacgaatacagagtatctggtcacgactgcaagaaactgggctgctaaataaatgtgagcgaattcaaggtcgaaaagccagcctggaggaaatacagcttgttcattctgaacatcactcactgttgtatggcaccaaccccctggacggacagaagctggaccccaggatactcctaggtgatgactctcaaaagtttttttcctcattaccttgtggtggacttggggtggacagtgacaccatttggaatgagctacactcgtccggtgctgcacgcatggctgttggctgtgtcatcgagctggcttccaaagtggcctcaggagagctgaagaatgggtttgctgttgtgaggccccctggccatcacgctgaagaatccacagccatggggttctgcttttttaattcagttgcaattaccgccaaatacttgagagaccaactaaatataagcaagatattgattgtagatctggatgttcaccatggaaacggtacccagcaggccttttatgctgaccccagcatcctgtacatttcactccatcgctatgatgaagggaactttttccctggcagtggagccccaaatgaggttggaacaggccttggagaagggtacaatataaatattgcctggacaggtggccttgatcctcccatgggagatgttgagtaccttgaagcattcaggaccatcgtgaagcctgtggccaaagagtttgatccagacatggtcttagtatctgctggatttgatgcattggaaggccacacccctcctctaggagggtacaaagtgacggcaaaatgttttggtcatttgacgaagcaattgatgacattggctgatggacgtgtggtgttggctctagaaggaggacatgatctcacagccatctgtgatgcatcagaagcctgtgtaaatgcccttctaggaaatgagctggagccacttgcagaagatattctccaccaaagcccgaatatgaatgctgttatttctttacagaagatcattgaaattcaaagcaagtattggaagtcagtaaggatggtggctgtgccaaggggctgtgctctggctggtgctcagttgcaagaggagacagagaccgtttctgccctggcctccctaacagtggatgtggaacagccctttgctcaggaagacagcagaactgctggtgagcctatggaagaggagccagccttgtgaagtgccaagtccccctctgatatttcctgtgtgtgacatcattgtgtatccccccaccccagtaccctcagacatgtcttgtctgctgcctgggtggcacagattcaatggaacataaacactgggcacaaaattctgaacagcagcttcacttgttctttggatggacttgaaagggcattaaagattccttaaacgtaaccgctgtgattctagagttacagtaaaccacgattggaagaaactgcttccagcatgcttttaatatgctgggtgacccactcctagacaccaagtttgaactagaaacattcagtacagcactagatattgttaatttcagaagctatgacagccagtgaaattttgggcaaaacctgagacatagtcattcctgacattctgatcagctttttttggggtaatttgtttttcaaacagtcttaacttgtttacaagatttgcttttagctatgaacggatcgtaattccacccagaatgtaatgtttcttgtttgtttgttttgttttgttagggtttttttctcaactttaacacacagttcaactgttcctagtaaaagttcaagatggaggaactagcatgaggcttttttcagtatctcgaagtccaaatgccaaaggaacctcacacactgtttgtaatggtgcaatattttatatcacttttttttaaacatccccaacatctttgtgttctcacacacaggcaatttgcaatgttgcaattgtgttggagaatgaagtccccccacctcccagccacacacacatcctttgttctcatgacagtaggtctgagcaaatgttccaccaagcattttcagtgtctttgaaaagcacgtaacttttcaaaggtggtcttaatttgttgcatatctatcaaggacttattcactcacctttccttttctgccctctatcaattgatttcttcttacctttcatcattcattccttcctttagaaaaactgaagattacccataatctcctcttattacttgagggccttgactatttagtttattttgtttactttacaggttaacacagttgttttgtctgattgcattttattaactgtgaagccgttgaaatgaatatcacttaagcaacgttgctaaatttctatgtgtttgaaatgtgttaatgaaggcactgcttatttgtagtcaccttgaactgacttaacctagaagctgtgccttcttgtgaaaaaaaaaaaaaacaaaaacaaaaaacagcctttaaacaagtttccttagtgtcaaaagttaaaaataaa

SEQ ID NO: 192 - protein, 1066 aa, Homo sapiens
MHSMISSVDVKSEVPVGLEPISPLDLRTDLRMMMPVVDPVVREKQLQQELLLIQQQQQIQKQLLIAEFQKQHENLTRQHQAQLQEHIKELLAIKQQQELLEKEQKLEQQRQEQEVERHRREQQLPPLRGKDRGRERAVASTEVKQKLQEFLLSKSATKDTPTNGKNHSVSRHPKLWYTAAHHTSLDQSSPPLSGTSPSYKYTLPGAQDAKDDFPLRKTASEPNLKVRSRLKQKVAERRSSPLLRRKDGNVVTSFKKRMFEVTESSVSSSSPGSGPSSPNNGPTGSVTENETSVLPPTPHAEQMVSQQRILIHEDSMNLLSLYTSPSLPNITLGLPAVPSQLNASNSLKEKQKCETQTLRQGVPLPGQYGGSIPASSSHPHVTLEGKPPNSSHQALLQHLLLKEQMRQQKLLVAGGVPLHPQSPLATKERISPGIRGTHKLPRHRPLNRTQSAPLPQSTLAQLVIQQQHQQFLEKQKQYQQQIHMNKLLSKSIEQLKQPGSHLEEAEEELQGDQAMQEDRAPSSGNSTRSDSSACVDDTLGQVGAVKVKEEPVDSDEDAQIQEMESGEQAAFMQQPFLEPTHTRALSVRQAPLAAVGMDGLEKHRLVSRTHSSPAASVLPHPAMDRPLQPGSATGIAYDPLMLKHQCVCGNSTTHPEHAGRIQSIWSRLQETGLLNKCERIQGRKASLEEIQLVHSEHHSLLYGTNPLDGQKLDPRILLGDDSQKFFSSLPCGGLGVDSDTIWNELHSSGAARMAVGCVIELASKVASGELKNGFAVVRPPGHHAEESTAMGFCFFNSVAITAKYLRDQLNISKILIVDLDVHHGNGTQQAFYADPSILYISLHRYDEGNFFPGSGAPNEVGTGLGEGYNINIAWTGGLDPPMGDVEYLEAFRTIVKPVAKEFDPDMVLVSAGFDALEGHTPPLGGYKVTAKCFGHLTKQLMTLADGRVVLALEGGHDLTAICDASEACVNALLGNELEPLAEDILHQSPNMNAVISLQKIIEIQSKYWKSVRMVAVPRGCALAGAQLQEETETVSALASLTVDVEQPFAQEDSRTAGEPMEEEPAL

SEQ ID NO: 193 - DNA, 3210 bp, Homo sapiens
  CDS (1)...(3210): HDAC9 variant 5
atgcacagtatgatcagctcagtggatgtgaagtcagaagttcctgtgggcctggagcccatctcacctttagacctaaggacagacctcaggatgatgatgcccgtggtggaccctgttgtccgtgagaagcaattgcagcaggaattacttcttatccagcagcagcaacaaatccagaagcagcttctgatagcagagtttcagaaacagcatgagaacttgacacggcagcaccaggctcagcttcaggagcatatcaagttgcaacaggaacttctagccataaaacagcaacaagaactcctagaaaaggagcagaaactggagcagcagaggcaagaacaggaagtagagaggcatcgcagagaacagcagcttcctcctctcagaggcaaagatagaggacgagaaagggcagtggcaagtacagaagtaaagcagaagcttcaagagttcctactgagtaaatcagcaacgaaagacactccaactaatggaaaaaatcattccgtgagccgccatcccaagctctggtacacggctgcccaccacacatcattggatcaaagctctccaccccttagtggaacatctccatcctacaagtacacattaccaggagcacaagatgcaaaggatgatttcccccttcgaaaaactgcctctgagcccaacttgaaggtgcggtccaggttaaaacagaaagtggcagagaggagaagcagccccttactcaggcggaaggatggaaatgttgtcacttcattcaagaagcgaatgtttgaggtgacagaatcctcagtcagtagcagttctccaggctctggtcccagttcaccaaacaatgggccaactggaagtgttactgaaaatgagacttcggttttgccccctacccctcatgccgagcaaatggtttcacagcaacgcattctaattcatgaagattccatgaacctgctaagtctttatacctctccttctttgcccaacattaccttggggcttcccgcagtgccatcccagctcaatgcttcgaattcactcaaagaaaagcagaagtgtgagacgcagacgcttaggcaaggtgttcctctgcctgggcagtatggaggcagcatcccggcatcttccagccaccctcatgttactttagagggaaagccacccaacagcagccaccaggctctcctgcagcatttattattgaaagaacaaatgcgacagcaaaagcttcttgtagctggtggagttcccttacatcctcagtctcccttggcaacaaaagagagaatttcacctggcattagaggtacccacaaattgccccgtcacagacccctgaaccgaacccagtctgcacctttgcctcagagcacgttggctcagctggtcattcaacagcaacaccagcaattcttggagaagcagaagcaataccagcagcagatccacatgaacaaactgctttcgaaatctattgaacaactgaagcaaccaggcagtcaccttgaggaagcagaggaagagcttcagggggaccaggcgatgcaggaagacagagcgccctctagtggcaacagcactaggagcgacagcagtgcttgtgtggatgacacactgggacaagttggggctgtgaaggtcaaggaggaaccagtggacagtgatgaagatgctcagatccaggaaatggaatctggggagcaggctgcttttatgcaacagcctttcctggaacccacgcacacacgtgcgctctctgtgcgccaagctccgctggctgcggttggcatggatggattagagaaacaccgtctcgtctccaggactcactcttcccctgctgcctctgttttacctcacccagcaatggaccgccccctccagcctggctctgcaactggaattgcctatgaccccttgatgctgaaacaccagtgcgtttgtggcaattccaccacccaccctgagcatgctggacgaatacagagtatctggtcacgactgcaagaaactgggctgctaaataaatgtgagcgaattcaaggtcgaaaagccagcctggaggaaatacagcttgttcattctgaacatcactcactgttgtatggcaccaaccccctggacggacagaagctggaccccaggatactcctaggtgatgactctcaaaagtttttttcctcattaccttgtggtggacttggggtggacagtgacaccatttggaatgagctacactcgtccggtgctgcacgcatggctgttggctgtgtcatcgagctggcttccaaagtggcctcaggagagctgaagaatgggtttgctgttgtgaggccccctggccatcacgctgaagaatccacagccatggggttctgcttttttaattcagttgcaattaccgccaaatacttgagagaccaactaaatataagcaagatattgattgtagatctggatgttcaccatggaaacggtacccagcaggccttttatgctgaccccagcatcctgtacatttcactccatcgctatgatgaagggaactttttccctggcagtggagccccaaatgaggttggaacaggccttggagaagggtacaatataaatattgcctggacaggtggccttgatcctcccatgggagatgttgagtaccttgaagcattcaggaccatcgtgaagcctgtggccaaagagtttgatccagacatggtcttagtatctgctggatttgatgcattggaaggccacacccctcctctaggagggtacaaagtgacggcaaaatgttttggtcatttgacgaagcaattgatgacattggctgatggacgtgtggtgttggctctagaaggaggacatgatctcacagccatctgtgatgcatcagaagcctgtgtaaatgcccttctaggaaatgagctggagccacttgcagaagatattctccaccaaagcccgaatatgaatgctgttatttctttacagaagatcattgaaattcaaagcaagtattggaagtcagtaaggatggtggctgtgccaaggggctgtgctctggctggtgctcagttgcaagaggagacagagaccgtttctgccctggcctccctaacagtggatgtggaacagccctttgctcaggaagacagcagaactgctggtgagcctatggaagaggagccagccttgtga

SEQ ID NO: 194 - protein, 1069 aa, Homo sapiens
MHSMISSVDVKSEVPVGLEPISPLDLRTDLRMMMPVVDPVVREKQLQQELLLIQQQQQIQKQLLIAEFQKQHENLTRQHQAQLQEHIKLQQELLAIKQQQELLEKEQKLEQQRQEQEVERHRREQQLPPLRGKDRGRERAVASTEVKQKLQEFLLSKSATKDTPTNGKNHSVSRHPKLWYTAAHHTSLDQSSPPLSGTSPSYKYTLPGAQDAKDDFPLRKTASEPNLKVRSRLKQKVAERRSSPLLRRKDGNVVTSFKKRMFEVTESSVSSSSPGSGPSSPNNGPTGSVTENETSVLPPTPHAEQMVSQQRILIHEDSMNLLSLYTSPSLPNITLGLPAVPSQLNASNSLKEKQKCETQTLRQGVPLPGQYGGSIPASSSHPHVTLEGKPPNSSHQALLQHLLLKEQMRQQKLLVAGGVPLHPQSPLATKERISPGIRGTHKLPRHRPLNRTQSAPLPQSTLAQLVIQQQHQQFLEKQKQYQQQIHMNKLLSKSIEQLKQPGSHLEEAEEELQGDQAMQEDRAPSSGNSTRSDSSACVDDTLGQVGAVKVKEEPVDSDEDAQIQEMESGEQAAFMQQPFLEPTHTRALSVRQAPLAAVGMDGLEKHRLVSRTHSSPAASVLPHPAMDRPLQPGSATGIAYDPLMLKHQCVCGNSTTHPEHAGRIQSIWSRLQETGLLNKCERIQGRKASLEEIQLVHSEHHSLLYGTNPLDGQKLDPRILLGDDSQKFFSSLPCGGLGVDSDTIWNELHSSGAARMAVGCVIELASKVASGELKNGFAVVRPPGHHAEESTAMGFCFFNSVAITAKYLRDQLNISKILIVDLDVHHGNGTQQAFYADPSILYISLHRYDEGNFFPGSGAPNEVGTGLGEGYNINIAWTGGLDPPMGDVEYLEAFRTIVKPVAKEFDPDMVLVSAGFDALEGHTPPLGGYKVTAKCFGHLTKQLMTLADGRVVLALEGGHDLTAICDASEACVNALLGNELEPLAEDILHQSPNMNAVISLQKIIEIQSKYWKSVRMVAVPRGCALAGAQLQEETETVSALASLTVDVEQPFAQEDSRTAGEPMEEEPAL

SEQ ID NO: 195 - DNA, 7940 bp, Homo sapiens
  CDS (241)...(7563): NCOR-1 variant 1
tcaagatggcggccaaggtggcgaagcagcagccgcggcggcggcggcggctggagtgagcgtccgactcgccgcgccgaacgaggtcccggtgtagggccgcgcgccgtggccgcgtcccactcctcaggccggggcgcacgtcggctcccacgcttagccagctcccggtggtttcctagaaacatgattgtttattggcattgatctcacagtctggtgaggacttctttactgataatgtcaagttcaggttatcctcccaaccaaggagcattcagcacagaacaaagtcgttatcctcctcactctgtccagtatacatttcccaacacccgccaccagcaggagttcgcagtccctgattatcgttcctctcatcttgaagtgagtcaggcatcacagcttttgcagcaacagcagcagcaacagcttcgaaggcgaccttccttgctttcagaatttcacccaggttctgacaggcctcaagaaaggagaactagttatgaaccgtttcatccaggcccatccccagtggatcatgattcactggaatcgaagcgaccacgtctggaacaggtttctgattctcattttcagcgtgtcagtgctgcggttttgcctttagtgcacccgctgccagaagggctgagggcttctgcagatgctaagaaggatccagcattcggaggcaaacatgaagctccatcctctccaatttcggggcaaccatgtggagatgatcaaaatgcttcaccttcaaaactctcaaaggaagagttaatacagagtatggatcgtgtagatcgagaaattgcaaaagtagaacagcagatccttaaactgaaaaagaaacaacaacagcttgaagaagaggcagctaaacctcctgagcctgagaagcccgtgtcccctcctcctgtggagcagaaacaccgcagtattgtccaaattatttatgatgagaatcggaaaaaagcagaagaagctcataaaatttttgaaggtcttggcccaaaagttgaactgccactgtataaccagccatcagataccaaggtgtaccatgagaacatcaagacaaaccaggtgatgaggaaaaaactcattttattttttaaaagaagaaatcatgcaagaaaacaaagggaacaaaaaatctgccagcgttatgatcagctcatggaggcatgggagaaaaaagtggacagaatagaaaataatcctcggaggaaagctaaagaaagcaaaacaagggaatactatgaaaagcagtttccagaaattcgaaaacaaagagaacagcaagaaagatttcagcgagttgggcagaggggagctggtctttcagccaccattgctaggagtgagcatgagatttctgaaattattgatgggctctctgagcaggagaataatgagaaacaaatgcggcagctctctgtgattccacctatgatgtttgatgcagaacaaagacgagtcaagttcattaacatgaatgggcttatggaggaccctatgaaagtgtataaagataggcagtttatgaatgtttggactgaccatgaaaaggagatctttaaggacaagtttatccagcatccaaaaaactttggactaattgcatcatacttggagaggaagagtgttcctgattgtgttttgtattactatttaaccaagaaaaatgagaattataaagccctcgtcagaaggaattatgggaaacgcagaggcagaaaccagcaaattgctcgaccctcgcaagaagaaaaagtagaagaaaaagaagaggataaagcagaaaaaacagaaaaaaaagaagaagaaaagaaagatgaagaggaaaaagatgaaaaagaagactccaaagaaaataccaaggaaaaggacaagatagatggtacagcagaagaaactgaggaaagagagcaagccacaccccgggggcgaaagactgccaacagtcagggccgccgtaagggccggatcaccaggtccatgacaaacgaagctgcagctgccagtgctgcagccgcagcggctactgaagagcccccaccacctctgccaccgccaccagaacccatttctacagagcctgtggagacctctcgatggacagaagaagaaatggaagttgctaaaaaaggtctagtagaacatggtcgtaactgggcagcaattgctaaaatggtgggaacgaaaagtgaagctcaatgtaaaaacttctattttaactataaaaggcgacacaatcttgacaacctcttacagcagcataaacagaaaacttcacgaaaacctcgtgaagagcgagatgtgtctcaatgtgaaagtgtcgcttccactgtttctgctcaggaggatgaagatattgaagcctccaatgaagaagaaaatccagaagacagcgaagttgaagctgtcaagcccagcgaggacagtcctgaaaatgctacttctcgaggaaacacagaacctgcggttgagcttgagcccaccacggaaactgcacccagtacatctccctccttagcagttccaagtacaaaaccagctgaagatgaaagtgtggagacccaggtgaatgacagcatcagtgctgagacagcagagcagatggatgtagatcagcaggagcacagtgctgaagagggttctgtttgtgatcccccacccgctaccaaagctgactctgtggacgttgaagtgagggtgccagaaaaccatgcatctaaagttgaaggtgataataccaaagaaagagacttggatagagccagtgagaaggtggaacctagagatgaagatttggtggtagctcagcaaataaatgcccaaaggcccgagccccagtcagacaatgattccagtgccacgtgcagcgctgatgaggatgtggatggagagccagagaggcagagaatgtttcctatggactcaaagccttcactgttaaaccccactggatctatactcgtctcatctccgttaaaaccaaatccactggatctgccacagcttcagcatcgagctgctgttatcccaccaatggtatcctgcaccccatgtaacataccaattggaaccccagtgagcggctatgctctctaccagcgacacattaaagcaatgcatgagtcagcactcctggaggagcagcggcagagacaagaacagatagatttggaatgtagaagttctacaagtccatgtggcacatccaagagtccaaacagagagtgggaagtccttcagcctgctccacatcaagtgataactaatctccctgaaggcgttcggcttccgacaactcgaccaaccaggccaccgccccctctcatcccgtcatccaaaaccacagtggcttcagaaaaaccatcttttataatgggaggctccatctcacagggaacaccaggcacttatttgacttctcataatcaggcttcctacactcaagaaacacccaagccgtcagtgggatctatctctcttggactgccacggcaacaggaatctgccaaatcagctactttgccctacatcaagcaggaagaattttctccccgaagccaaaactcacaacctgagggtctgttggtcagggcccaacatgaaggtgtagtcagaggtaccgcaggagccatacaagaaggaagtataactcggggaactccaaccagcaaaatttcagtggagagcattccatccctacggggctctatcactcagggcaccccggctctgccccagactggcataccaacagaggctttggtgaaggggtccatttcgagaatgcccattgaagacagcagtcctgagaaaggcagagaggaagctgcatccaaaggccatgttatttatgaaggcaaaagtggacatatcttgtcatatgataatattaagaatgcccgagaagggactaggagtccaagaacagctcatgaaatcagtttaaagagaagctatgaatcagtggaaggaaatataaagcaagggatgtcaatgagggagtctcctgtatcagcaccgttagaggggctgatatgccgagcattacccagggggagtcctcattctgacctcaaagaaaggactgtattgtctggctccataatgcaggggacaccaagagcaacaactgaaagctttgaagatggccttaaatatcccaaacaaattaaaagggaaagtcctcccatacgagcatttgaaggtgccattaccaaaggaaaaccatatgatggcatcaccaccatcaaagaaatggggcgttccattcatgagattccaaggcaagatattttaactcaggaaagtcggaaaactccagaagtggtccagagcacacggccgataattgagggttccatttcccagggcacaccaataaagtttgacaacaactcaggtcaatctgccatcaaacacaatgtcaaatccttaatcacggggcctagcaaactatcccgtggaatgcctccgctggaaattgtgccagagaacataaaagtggtagaacggggaaaatatgaggatgtgaaagcaggcgagaccgtgcgttcccggcacacgtcagtggtaagctctggcccctccgttcttaggtccacactgcatgaagctcccaaagcacaactgagccctgggatttatgatgacaccagtgcacggaggacccctgtgagttatcaaaacaccatgtccagaggctcacccatgatgaacagaacttctgatgttacaatttcttctaacaagtctaccaatcatgaaaggaaatcgacactgacccctacccagagggaaagtatcccagcgaagtctccagtgcctggggtggaccctgtcgtgagccacagtccgtttgatccccatcacagaggcagcactgcaggcgaggtttatcggagccacctgcccacgcacttggatccagccatgccttttcacagggctttggatcctgcagcggctgcttacctgtttcagagacagctttcaccaactccaggttacccaagtcagtatcagctttacgcaatggagaacacaagacagacaatcttaaatgattacattacctcacaacagatgcaagtgaacttgcgtccagatgtggccagaggactctccccaagagagcagccactgggtctcccatacccagcaacgagaggaatcattgacctgaccaatatgcctccaacaattttagtgcctcatccagggggaacaagcactcctcccatggacagaatcacttatattcctggtacacagattactttccctcccaggccgtacaactctgcttccatgtctccaggacacccaacacaccttgcagctgctgcaagtgctgagagggaacgggaacgggagcgggagaaggagcgggagcgggaacggattgctgcagcttcctccgacctctacctgcggccaggctcagaacagcctggccgacctggcagtcatggatatgttcgctccccttccccttcagtaagaactcaggagaccatgttgcaacagagacccagtgttttccaaggaaccaatggaaccagtgtaatcacacctttggatccaactgctcagctacgaatcatgccactgcctgctgggggcccttcaataagccaaggcctgccagcctcccgttacaacactgctgcggatgccctggctgctcttgtggatgctgcagcttctgcaccccagatggatgtgtccaaaacaaaagagagtaagcatgaagctgccaggttagaagaaaatttgagaagcaggtcagcagcagttagtgaacagcagcagctagagcagaaaaccctggaggtggagaagagatctgttcagtgtttatacacttcttcagcctttccaagtggcaagccccagcctcattcttcagtagtttattctgaggctgggaaagataaagggcctcctccaaaatccagatatgaggaagagctaaggaccagagggaagactaccattactgcagctaacttcatagacgtgatcatcacccggcaaattgcctcggacaaggatgcgagggaacgtggctctcaaagttcagactcttctagtagcttatcttctcacaggtatgaaacacctagcgatgctattgaggtgataagtcctgccagctcacctgcgccaccccaggagaaactgcagacctatcagccagaggttgttaaggcaaatcaagcggaaaatgatcctaccagacaatatgaaggaccattacatcactatcgaccacagcaggaatcaccatctccccaacaacagctgcccccttcttcacaggcagagggaatggggcaagtgcccaggacccatcggctgatcacacttgctgatcacatctgtcaaattatcacacaagattttgctagaaatcaagtttcctcgcagactccccagcagcctcctacttctacattccagaactcaccttctgctttggtatctacacctgtgaggactaaaacatcaaaccgttacagcccagaatcccaggctcagtctgtccatcatcaaagaccaggttcaagggtctctccagaaaatcttgtggacaaatccaggggaagtaggcctggaaaatccccagagaggagtcacgtctcttcggagccctacgagcccatctccccaccccaggttccggttgtgcatgagaaacaggacagcttgctgctcttgtctcagaggggcgcagagcctgcagagcagaggaatgatgcccgctcaccagggagtataagctacttgccttcattcttcaccaagcttgaaaatacatcacccatggttaaatcaaagaagcaggagatttttcgtaagttgaactcctctggtggaggtgactctgatatggcagctgctcagccaggaactgagatctttaatctgccagcagttactacgtcaggctcagttagctctagaggccattcttttgctgatcctgccagtaatcttgggctggaagacattatcaggaaggctctcatgggaagctttgatgacaaagttgaggatcatggagttgtcatgtcccagcctatgggagtagtgcctggtactgccaacacctcagttgtgaccagtggtgagacacgaagagaggaaggggacccatcacctcattcaggaggagtttgcaaaccaaagctgatcagcaagtcaaacagcaggaaatctaagtctcctatacctgggcaaggctacttaggaacggaacggccctcttcagtctcctctgtacattcagaaggggattaccataggcagacgccagggtgggcctgggaagacaggccctcttcaacaggctcaactcagtttccttataaccctctgactatgcggatgctcagcagtactccaccaacaccgattgcatgtgctccctctgcggtgaaccaagcagctcctcaccaacagaacaggatctgggagcgagagcctgccccactgctctcagcacagtacgagaccctgtcggatagtgatgactgaactgcacaaagtgaggggaacagggtgcaggagagggatctctagtttttgtggtttaatttttagtagcaggtcaaaaacctgccctcctgtgacttattccctgagacttttcaggagagccagcccacagatgatgaagaaatgatggaagttcatttggagagtcaaatgggaaaaaaacaaacaaaaaactgcctttgatacaggcaattcagtggactataataatagtggagggttgagatgtagagtttttaaaaagtgaacagttgctgttcttacatctgtaaagaaaaccataatgtctttaaatcactcttctgtaaatagatgacctttttgcagtgtaaaaaaaaaaaaaaaaaaaaaaaaaa

SEQ ID NO: 196 - protein, 2440 aa, Homo sapiens
MSSSGYPPNQGAFSTEQSRYPPHSVQYTFPNTRHQQEFAVPDYRSSHLEVSQASQLLQQQQQQQLRRRPSLLSEFHPGSDRPQERRTSYEPFHPGPSPVDHDSLESKRPRLEQVSDSHFQRVSAAVLPLVHPLPEGLRASADAKKDPAFGGKHEAPSSPISGQPCGDDQNASPSKLSKEELIQSMDRVDREIAKVEQQILKLKKKQQQLEEEAAKPPEPEKPVSPPPVEQKHRSIVQIIYDENRKKAEEAHKIFEGLGPKVELPLYNQPSDTKVYHENIKTNQVMRKKLILFFKRRNHARKQREQKICQRYDQLMEAWEKKVDRIENNPRRKAKESKTREYYEKQFPEIRKQREQQERFQRVGQRGAGLSATIARSEHEISEIIDGLSEQENNEKQMRQLSVIPPMMFDAEQRRVKFINMNGLMEDPMKVYKDRQFMNVWTDHEKEIFKDKFIQHPKNFGLIASYLERKSVPDCVLYYYLTKKNENYKALVRRNYGKRRGRNQQIARPSQEEKVEEKEEDKAEKTEKKEEEKKDEEEKDEKEDSKENTKEKDKIDGTAEETEEREQATPRGRKTANSQGRRKGRITRSMTNEAAAASAAAAAATEEPPPPLPPPPEPISTEPVETSRWTEEEMEVAKKGLVEHGRNWAAIAKMVGTKSEAQCKNFYFNYKRRHNLDNLLQQHKQKTSRKPREERDVSQCESVASTVSAQEDEDIEASNEEENPEDSEVEAVKPSEDSPENATSRGNTEPAVELEPTTETAPSTSPSLAVPSTKPAEDESVETQVNDSISAETAEQMDVDQQEHSAEEGSVCDPPPATKADSVDVEVRVPENHASKVEGDNTKERDLDRASEKVEPRDEDLVVAQQINAQRPEPQSDNDSSATCSADEDVDGEPERQRMFPMDSKPSLLNPTGSILVSSPLKPNPLDLPQLQHRAAVIPPMVSCTPCNIPIGTPVSGYALYQRHIKAMHESALLEEQRQRQEQIDLECRSSTSPCGTSKSPNREWEVLQPAPHQVITNLPEGVRLPTTRPTRPPPPLIPSSKTTVASEKPSFIMGGSISQGTPGTYLTSHNQASYTQETPKPSVGSISLGLPRQQESAKSATLPYIKQEEFSPRSQNSQPEGLLVRAQHEGVVRGTAGAIQEGSITRGTPTSKISVESIPSLRGSITQGTPALPQTGIPTEALVKGSISRMPIEDSSPEKGREEAASKGHVIYEGKSGHILSYDNIKNAREGTRSPRTAHEISLKRSYESVEGNIKQGMSMRESPVSAPLEGLICRALPRGSPHSDLKERTVLSGSIMQGTPRATTESFEDGLKYPKQIKRESPPIRAFEGAITKGKPYDGITTIKEMGRSIHEIPRQDILTQESRKTPEVVQSTRPIIEGSISQGTPIKFDNNSGQSAIKHNVKSLITGPSKLSRGMPPLEIVPENIKVVERGKYEDVKAGETVRSRHTSVVSSGPSVLRSTLHEAPKAQLSPGIYDDTSARRTPVSYQNTMSRGSPMMNRTSDVTISSNKSTNHERKSTLTPTQRESIPAKSPVPGVDPVVSHSPFDPHHRGSTAGEVYRSHLPTHLDPAMPFHRALDPAAAAYLFQRQLSPTPGYPSQYQLYAMENTRQTILNDYITSQQMQVNLRPDVARGLSPREQPLGLPYPATRGIIDLTNMPPTILVPHPGGTSTPPMDRITYIPGTQITFPPRPYNSASMSPGHPTHLAAAASAEREREREREKERERERIAAASSDLYLRPGSEQPGRPGSHGYVRSPSPSVRTQETMLQQRPSVFQGTNGTSVITPLDPTAQLRIMPLPAGGPSISQGLPASRYNTAADALAALVDAAASAPQMDVSKTKESKHEAARLEENLRSRSAAVSEQQQLEQKTLEVEKRSVQCLYTSSAFPSGKPQPHSSVVYSEAGKDKGPPPKSRYEEELRTRGKTTITAANFIDVIITRQIASDKDARERGSQSSDSSSSLSSHRYETPSDAIEVISPASSPAPPQEKLQTYQPEVVKANQAENDPTRQYEGPLHHYRPQQESPSPQQQLPPSSQAEGMGQVPRTHRLITLADHICQIITQDFARNQVSSQTPQQPPTSTFQNSPSALVSTPVRTKTSNRYSPESQAQSVHHQRPGSRVSPENLVDKSRGSRPGKSPERSHVSSEPYEPISPPQVPVVHEKQDSLLLLSQRGAEPAEQRNDARSPGSISYLPSFFTKLENTSPMVKSKKQEIFRKLNSSGGGDSDMAAAQPGTEIFNLPAVTTSGSVSSRGHSFADPASNLGLEDIIRKALMGSFDDKVEDHGVVMSQPMGVVPGTANTSVVTSGETRREEGDPSPHSGGVCKPKLISKSNSRKSKSPIPGQGYLGTERPSSVSSVHSEGDYHRQTPGWAWEDRPSSTGSTQFPYNPLTMRMLSSTPPTPIACAPSAVNQAAPHQQNRIWEREPAPLLSAQYETLSDSDD

SEQ ID NO: 197 - DNA, 3120 bp, Homo sapiens
  CDS (85)...(2829): NCOR-1 variant 2
atgtgatggtgtagatggtttcctagacacatgattgtttattggcgttgatctcgcagtctggtgagaacttctttactgataatgtcaagttcagtttatcctcccaaccaaggagcattcagcacagaacaaagtcgttctcctcctcactctgtaaagtatacgtttcccagcacccaccaccagcaggatccagcattcggaggcaaacatgaagctccatcctctccaatttcggggcaaccatgtggagatgatcaaaatgcttcaccttcaaaactctcaaaggaagagttaatacagagtatggatcgtgtagatcgagaaattgcaaaagtagaacagcagatccttaaactgaaaaagaaacaacaacagcttgaagaagaggcagctaaacctcctgagcctgagaagcccgtgtcccctcctcctgtggagcagaaacaccgcagtattgtccaaattatttatgatgagaatcggaaaaaagcagaagaagctcataaaatttttgaaggtcttggcccaaaagttgaactgccactgtataaccagccatcagataccaaggtgtaccatgagaacatcaagacaaaccaggtgatgaggaaaaaactcattttattttttaaaagaagaaatcatgcaagaaaacaaagggaacaaaaaatctgccagcgttatgatcagctcatggaggcatgggagaaaaaagtggacagaatagaaaataatcctcggaggaaagctaaagaaagcaaaacaagggaatactatgaaaagcagtttccagaaattcgaaaacaaagagaacagcaagaaagatttcagcgagttgggcagaggggagctggtctttcagccaccattgctaggagtgagcatgagatttctgaaattattgatgggctctctgagcaggaaagtaatgagaaacaaatgcggcagctctctgtgattccacctatgatgtttgatgcagaacaaagacgagtcaagttcattaacatgaatgggcttatggaggaccctatgaaagtgtataaagataggcagtttatgaatgtttggactgaccatgaaaaggagatctttaaggacaagtttatccagcatccaaaaaactttggactaattgcatcatacttggagaggaagagtgttcctgattgtgttttgtattactatttaaccaagaaaaatgagaattataaagccctcgtcagaaggaattatgggaaacgcagaggcagaaaccagcaaattgctcgaccctcgcaagaagaaaaagtagaagaaaaagaagaggataaagcagaaaaaacagaaaaaaaagaagaagaaaagaaagatgaagaggaaaaagatgaaaaagaagactccaaagaaaataccaaggaaaaggacaagatagatggtacagcagaagaaactgaggaaagagagcaagccacaccccgggggcgaaagactgccaacagtcagggccgccgtaagggccggatcaccaggtccatgacaaacgaagctgcagctgccagtgctgcagccgcagcggctactgaagagcccccaccacctctgccaccgccaccagaacccatttctacagagcctgtggagacctctcgatggacagaagaagaaatggaagttgctaaaaaaggtctagtagaacatggtcgtaactgggcagcaattgctaaaatggtgggaacgaaaagtgaagctcaatgtaaaaacttctattttaactataaaaggcgacacaatcttgacaacctcttacagcagcataaacagaaaacttcacgaaaacctcgtgaagagcgagatgtgtctcaatgtgaaagtgtcgcttccactgtttctgctcaggaggatgaagatattgaagcctccaatgaagaagaaaatccagaagacagcgaaggtgcagaaaatagttctgatacagaaagtgctccttctccttcaccagttgaagctgtcaagcccagcgaggacagtcctgaaaatgctacttctcgaggaaacacagaacctgcggttgagcttgagcccaccacggaaactgcacccagtacatctccctccttagcagttccaagtacaaaaccagctgaagatgaaagtgtggagacccaggtgaatgacagcatcagtgctgagacagcagagcagatggatgtagatcagcaggagcacagtgctgaagagggttctgtttgtgatcccccacccgctaccaaagctgactctgtggacgttgaagtgagggtgccagaaaaccatgcatctaaagttgaaggtgataataccaaagaaagagacttggatagagccagtgagaaggtggaacctagagatgaagatttggtggtagctcagcaaataaatgcccaaaggcccgagccccagtcagacaatgattccagtgccacgtgcagcgctgatgaggatgtggatggagagccagagaggcagagaatgtttcctatggactcaaagccttcactgttaaaccccactggatctatactcgtctcatctccgttaaaaccaaatccactggatctgccacagcttcagcatcgagctgctgttatcccaccaatggtatcctgcaccccatgtaacataccaattggaaccccagtgagcggctatgctctctaccagcgacacattaaagcaatgcatgagtcagcactcctggaggagcagcggcagagacaagaacagatagatttggaatgtagaagttctacaagtccatgtggcacatccaagagtccaaacagagagtgggaaggtaggtagatagagctatcaccaagagaacttttatgaagggaaataaagctaaacccaaaagcagtgtccattgtgctttgtaagttgtcagcctcccaactgattattatatttgtcctaacagacacagttccttaaattgaccttaaactatgaagaaatgttagtattattaactactaaaggatgccagtaacatttttaatagcattctagttaatgtgaattttctgatattcatctttgtgctggaagacattataaataaagttatgctttatgttccgttcaaaaaaa

SEQ ID NO: 198 - protein, 914 aa, Homo sapiens [sequence omitted]

SEQ ID NO: 199 - DNA, 3997 bp, Homo sapiens
  CDS (216)...(3095): NCOR-1 variant 3
tttaaagaagagtattgaattttatttttaatgttacataaggtggtaaaatactggtgctatgatccaaaaggtgacagtactctccaaatctcagtttctactagttgtttacattttcatatgttgtttacattttcatattttgcaatattgaatgttaaatgttgagtggaaagagaagatccaaatacatgaatatagtctttatttgaatggttgagaaatggacaaatattatcatacttgcaagtttcttaagaacttgtggcattggctctttttttccagttacaatttcttctaacaagtctaccaatcatgaaaggaaatcgacactgacccctacccagagggaaagtatcccagcgaagtctccagtgcctggggtggaccctgtcgtgagccacagtccgtttgatccccatcacagaggcagcactgcaggcgaggtttatcggagccacctgcccacgcacttggatccagccatgccttttcacagggctttggatcctgcggctgcttacctgtttcagagacagctttcaccaactccaggttacccaagtcagtatcagctttacgcaatggagaacacaagacagacaatcttaaatgattacattacctcacaacagatgcaagtgaacttgcgtccagatgtggccagaggactctccccaagagagcagccactgggtctcccatacccagcaacgagaggaatcattgacctgaccaatatgcctccaacaattttagtgcctcatccagggggaacaagcactcctcccatggacagaatcacttatattcctggtacacagattactttccctcccaggccgtacaactctgcttccatgtctccaggacacccaacacaccttgcagctgctgcaagtgctgagagggaacgggaacgggagcgggagaaggagcgggagcgggaacggattgctgcagcttcctccgacctctacctgcggccaggctcagaacagcctggccgacctggcagtcatggatatgttcgctccccttccccttcagtaagaactcaggagaccatgttgcaacagagacccagtgttttccaaggaaccaatggaaccagtgtaatcacacctttggatccaactgctcagctacgaatcatgccactgcctgctgggggcccttcaataagccaaggcctgccagcctcccgttacaacactgctgcggatgccctggctgctcttgtggatgctgcagcttctgcaccccagatggatgtgtccaaaacaaaagagagtaagcatgaagctgccaggttagaagaaaatttgagaagcaggtcagcagcagttagtgaacagcagcagctagagcagaaaaccctggaggtggagaagagatctgttcagtgtttatacacttcttcagcctttccaagtggcaagccccagcctcattcttcagtagtttattctgaggctgggaaagataaagggcctcctccaaaatccagatatgaggaagagctaaggaccagagggaagactaccattactgcagctaacttcatagacgtgatcatcacccggcaaattgcctcggacaaggatgcgagggaacgtggctctcaaagttcagactcttctagtagcttatcttctcacaggtatgaaacacctagcgatgctattgaggtgataagtcctgccagctcacctgcgccaccccaggagaaactgcagacctatcagccagaggttgttaaggcaaatcaagcggaaaatgatcctaccagacaatatgaaggaccattacatcactatcgaccacagcaggaatcaccatctccccaacaacagctgcccccttcttcacaggcagagggaatggggcaagtgcccaggacccatcggctgatcacacttgctgatcacatctgtcaaattatcacacaagattttgctagaaatcaagtttcctcgcagactccccagcagcctcctacttctacattccagaactcaccttctgctttggtatctacacctgtgaggactaaaacatcaaaccgttacagcccagaatcccaggctcagtctgtccatcatcaaagaccaggttcaagggtctctccagaaaatcttgtggacaaatccaggggaagtaggcctggaaaatccccagagaggagtcacgtctcttcggagccctacgagcccatctccccaccccaggttccggttgtgcatgagaaacaggacagcttgctgctcttgtctcagaggggcgcagagcctgcagagcagaggaatgatgcccgctcaccagggagtataagctacttgccttcattcttcaccaagcttgaaaatacatcacccatggttaaatcaaagaagcaggagatttttcgtaagttgaactcctctggtggaggtgactctgatatggcagctgctcagccaggaactgagatctttaatctgccagcagttactacgtcaggctcagttagctctagaggccattcttttgctgatcctgccagtaatcttgggctggaagacattatcaggaaggctctcatgggaagctttgatgacaaagttgaggatcatggagttgtcatgtcccagcctatgggagtagtgcctggtactgccaacacctcagttgtgaccagtggtgagacacgaagagaggaaggggacccatcacctcattcaggagtttgcaaaccaaagctgatcagcaagtcaaacagcaggaaatctaagtctcctatacctgggcaaggctacttaggaacggaacggccctcttcagtctcctctgtacattcagaaggggattaccataggcagacgccagggtgggcctgggaagacaggccctcttcaacaggctcaactcagtttccttataaccctctgactatgcggatgctcagcagtactccaccaacaccgattgcatgtgctccctctgcggtgaaccaagcagctcctcaccaacagaacaggatctgggagcgagagcctgccccactgctctcagcacagtacgagaccctgtcggatagtgatgactgaactgcacaaagtgaggggaacagggtgcaggagagggatctctagtttttgtggtttaatttttagtagcaggtcaaaaacctgccctcctgtgacttattccctgagacttttcaggagagccagcccacagatgatgaagaaatgatggaagttcatttggagagtcaaatgggaaaaaaacaaacaaaaaactgcctttgatacaggcaattcagtggactataataatagtggagggttgagatgtagagtttttaaaaagtgaacagttgctgttcttacatctgtaaagaaaaccataatgtctttaaatcactcttctgtaaatagatgacctttttgcagtgtatatccccttgctgtagtatctggtgtacttatgttcaaatcagcgcatcaactttgggggtgatttttaaaaatctttttgtctatctatctttttaaccctagccttctaaacaacctcatacagcccagttacataatgttggctgtcacgggcattgtacttttatctgatattgtttcctctaaattcagctttccagtgatgtttaaaatcttgtgaaaatgtttagatttttaacacagaccctgtcataaaatctgtacattagggtcaaaaggtaaaagtaacaaattctgccatattgtaaatttccagtgcaggctttaatttttttttttcattagtagcactgaaaaaatattactgcatgggtatgttctagttcagtttataaagttttaaaggcttatttgaggcatacctcactgttacgcacactggtaatttaaccatgcccctaagtattccttttctcctgcatttgatgcagcccaacaaagcttttgttttgaaataaatttgactaccctgtccataaaaaaaaaaa

SEQ ID NO: 200 - protein, 959 aa, Homo sapiens
MVEKWTNIIILASFLRTCGIGSFFPVTISSNKSTNHERKSTLTPTQRESIPAKSPVPGVDPVVSHSPFDPHHRGSTAGEVYRSHLPTHLDPAMPFHRALDPAAAYLFQRQLSPTPGYPSQYQLYAMENTRQTILNDYITSQQMQVNLRPDVARGLSPREQPLGLPYPATRGIIDLTNMPPTILVPHPGGTSTPPMDRITYIPGTQITFPPRPYNSASMSPGHPTHLAAAASAEREREREREKERERERIAAASSDLYLRPGSEQPGRPGSHGYVRSPSPSVRTQETMLQQRPSVFQGTNGTSVITPLDPTAQLRIMPLPAGGPSISQGLPASRYNTAADALAALVDAAASAPQMDVSKTKESKHEAARLEENLRSRSAAVSEQQQLEQKTLEVEKRSVQCLYTSSAFPSGKPQPHSSVVYSEAGKDKGPPPKSRYEEELRTRGKTTITAANFIDVIITRQIASDKDARERGSQSSDSSSSLSSHRYETPSDAIEVISPASSPAPPQEKLQTYQPEVVKANQAENDPTRQYEGPLHHYRPQQESPSPQQQLPPSSQAEGMGQVPRTHRLITLADHICQIITQDFARNQVSSQTPQQPPTSTFQNSPSALVSTPVRTKTSNRYSPESQAQSVHHQRPGSRVSPENLVDKSRGSRPGKSPERSHVSSEPYEPISPPQVPVVHEKQDSLLLLSQRGAEPAEQRNDARSPGSISYLPSFFTKLENTSPMVKSKKQEIFRKLNSSGGGDSDMAAAQPGTEIFNLPAVTTSGSVSSRGHSFADPASNLGLEDIIRKALMGSFDDKVEDHGVVMSQPMGVVPGTANTSVVTSGETRREEGDPSPHSGVCKPKLISKSNSRKSKSPIPGQGYLGTERPSSVSSVHSEGDYHRQTPGWAWEDRPSSTGSTQFPYNPLTMRMLSSTPPTPIACAPSAVNQAAPHQQNRIWEREPAPLLSAQYETLSDSDD

SEQ ID NO: 201 - DNA, 2471 bp, Homo sapiens
  CDS (208)...(1569): NCOR-1 variant 4
aaacagcagccgattcttttttattttttaatgatacagattgtttatattaattttgtttgcttacttctgcatttatattttgttccactagtcagacttcttcagtgaataattttttttttctccaaaattaaaataagttctttgtttgctatgtaccacatcctttcaggtgttcttctgaattatatttaatctttgataatggaaaagcacagacattcctggagtaagacatctatgtgttctctcctagatgatcctaccagacaatatgaaggaccattacatcactatcgaccacagcaggaatcaccatctccccaacaacagctgcccccttcttcacaggcagagggaatggggcaagtgcccaggacccatcggctgatcacacttgctgatcacatctgtcaaattatcacacaagattttgctagaaatcaagtttcctcgcagactccccagcagcctcctacttctacattccagaactcaccttctgctttggtatctacacctgtgaggactaaaacatcaaaccgttacagcccagaatcccaggctcagtctgtccatcatcaaagaccaggttcaagggtctctccagaaaatcttgtggacaaatccaggggaagtaggcctggaaaatccccagagaggagtcacgtctcttcggagccctacgagcccatctccccaccccaggttccggttgtgcatgagaaacaggacagcttgctgctcttgtctcagaggggcgcagagcctgcagagcagaggaatgatgcccgctcaccagggagtataagctacttgccttcattcttcaccaagcttgaaaatacatcacccatggttaaatcaaagaagcaggagatttttcgtaagttgaactcctctggtggaggtgactctgatatggcagctgctcagccaggaactgagatctttaatctgccagcagttactacgtcaggctcagttagctctagaggccattcttttgctgatcctgccagtaatcttgggctggaagacattatcaggaaggctctcatgggaagctttgatgacaaagttgaggatcatggagttgtcatgtcccagcctatgggagtagtgcctggtactgccaacacctcagttgtgaccagtggtgagacacgaagagaggaaggggacccatcacctcattcaggagtttgcaaaccaaagctgatcagcaagtcaaacagcaggaaatctaagtctcctatacctgggcaaggctacttaggaacggaacggccctcttcagtctcctctgtacattcagaaggggattaccataggcagacgccagggtgggcctgggaagacaggccctcttcaacaggctcaactcagtttccttataaccctctgactatgcggatgctcagcagtactccaccaacaccgattgcatgtgctccctctgcggtgaaccaagcagctcctcaccaacagaacaggatctgggagcgagagcctgccccactgctctcagcacagtacgagaccctgtcggatagtgatgactgaactgcacaaagtgaggggaacagggtgcaggagagggatctctagtttttgtggtttaatttttagtagcaggtcaaaaacctgccctcctgtgacttattccctgagacttttcaggagagccagcccacagatgatgaagaaatgatggaagttcatttggagagtcaaatgggaaaaaaacaaacaaaaaactgcctttgatacaggcaattcagtggactataataatagtggagggttgagatgtagagtttttaaaaagtgaacagttgctgttcttacatctgtaaagaaaaccataatgtctttaaatcactcttctgtaaatagatgacctttttgcagtgtatatccccttgctgtagtatctggtgtacttatgttcaaatcagcgcatcaactttgggggtgatttttaaaaatctttttgtctatctatctttttaaccctagccttctaaacaacctcatacagcccagttacataatgttggctgtcacgggcattgtacttttatctgatattgtttcctctaaattcagctttccagtgatgtttaaaatcttgtgaaaatgtttagatttttaacacagaccctgtcataaaatctgtacattagggtcaaaaggtaaaagtaacaaattctgccatattgtaaatttccagtgcaggctttaatttttttttttcattagtagcactgaaaaaatattactgcatgggtatgttctagttcagtttataaagttttaaaggcttatttgaggcatacctcactgttacgcacactggtaatttaaccatgcccctaagtattccttttctcctgcatttgatgcagcccaacaaagcttttgttttgaaataaatttgactaccctgtccataaaaaaaaaaa

SEQ ID NO: 202 - protein, 453 aa, Homo sapiens [sequence omitted]

SEQ ID NO: 203 - DNA, 8561 bp, Homo sapiens
  CDS (2)...(7555): NCOR-2
catgtcgggctccacacagcttgtggcacagacgtggagggccactgagccccgctacccgccccacagcctttcctacccagtgcagatcgcccggacgcacacggacgtcgggctcctggagtaccagcaccactcccgcgactatgcctcccacctgtcgccgggctccatcatccagccccagcggcggaggccctccctgctgtctgagttccagcccgggaatgaacggtcccaggagctccacctgcggccagagtcccactcatacctgcccgagctggggaagtcagagatggagttcattgaaagcaagcgccctcggctagagctgctgcctgaccccctgctgcgaccgtcacccctgctggccacgggccagcctgcgggatctgaagacctcaccaaggaccgtagcctgacgggcaagctggaaccggtgtctccccccagccccccgcacactgaccctgagctggagctggtgccgccacggctgtccaaggaggagctgatccagaacatggaccgcgtggaccgagagatcaccatggtagagcagcagatctctaagctgaagaagaagcagcaacagctggaggaggaggctgccaagccgcccgagcctgagaagcccgtgtcaccgccgcccatcgagtcgaagcaccgcagcctggtgcagatcatctacgacgagaaccggaagaaggctgaagctgcacatcggattctggaaggcctggggccccaggtggagctgccgctgtacaaccagccctccgacacccggcagtatcatgagaacatcaaaataaaccaggcgatgcggaagaagctaatcttgtacttcaagaggaggaatcacgctcggaaacaatggaagcagaagttctgccagcgctatgaccagctcatggaggccttggaaaaaaaggtggagcgcatcgaaaacaacccgcgccggcgggccaaggagagcaaggtgcgcgagtactacgaaaagcagttccctgagatccgcaagcagcgcgagctgcaggagcgcatgcagagcagggtgggccagcggggcagtgggctgtccatgtcggccgcccgcagcgagcacgaggtgtcagagatcatcgatggcctctcagagcaggagaacctggagaagcagatgcgccagctggccgtgatcccgcccatgctgtacgacgctgaccagcagcgcatcaagttcatcaacatgaacgggcttatggccgaccccatgaaggtgtacaaagaccgccaggtcatgaacatgtggagtgagcaggagaaggagaccttccgggagaagttcatgcagcatcccaagaactttggcctgatcgcatcattcctggagaggaagacagtggctgagtgcgtcctctattactacctgactaagaagaatgagaactataagagcctggtgagacggagctatcggcgccgcggcaagagccagcagcaacaacagcagcagcagcagcagcagcagcagcagcagcagcagcccatgccccgcagcagccaggaggagaaagatgagaaggagaaggaaaaggaggcggagaaggaggaggagaagccggaggtggagaacgacaaggaagacctcctcaaggagaagacagacgacacctcaggggaggacaacgacgagaaggaggctgtggcctccaaaggccgcaaaactgccaacagccagggaagacgcaaaggccgcatcacccgctcaatggctaatgaggccaacagcgaggaggccatcaccccccagcagagcgccgagctggcctccatggagctgaatgagagttctcgctggacagaagaagaaatggaaacagccaagaaaggtctcctggaacacggccgcaactggtcggccatcgcccggatggtgggctccaagactgtgtcgcagtgtaagaacttctacttcaactacaagaagaggcagaacctcgatgagatcttgcagcagcacaagctgaagatggagaaggagaggaacgcgcggaggaagaagaagaaagcgccggcggcggccagcgaggaggctgcattcccgcccgtggtggaggatgaggagatggaggcgtcgggcgtgagcggaaatgaggaggagatggtggaggaggctgaagccttacatgcctctgggaatgaggtgcccagaggggaatgcagtggcccagccactgtcaacaacagctcagacaccgagagcatcccctctcctcacactgaggccgccaaggacacagggcagaatgggcccaagcccccagccaccctgggcgccgacgggccacccccaggcccacccaccccaccacggaggacatcccgggcccccattgagcccaccccggcctctgaagccaccggagcccctacgcccccaccagcacccccatcgccctctgcacctcctcctgtggtccccaaggaggagaaggaggaggagaccgcagcagcgcccccagtggaggagggggaggagcagaagccccccgcggctgaggagctggcagtggacacagggaaggccgaggagcccgtcaagagcgagtgcacggaggaagccgaggaggggccggccaagggcaaggacgcggaggccgctgaggccacggccgagggggcgctcaaggcagagaagaaggagggcgggagcggcagggccaccactgccaagagctcgggcgccccccaggacagcgactccagtgctacctgcagtgcagacgaggtggatgaggccgagggcggcgacaagaaccggctgctgtccccaaggcccagcctcctcaccccgactggcgacccccgggccaatgcctcaccccagaagccactggacctgaagcagctgaagcagcgagcggctgccatcccccccatccaggtcaccaaagtccatgagcccccccgggaggacgcagctcccaccaagccagctcccccagccccaccgccaccgcaaaacctgcagccggagagcgacgcccctcagcagcctggcagcagcccccggggcaagagcaggagcccggcaccccccgccgacaaggaggccttcgcagccgaggcccagaagctgcctggggaccccccttgctggacttccggcctgcccttccccgtgcccccccgtgaggtgatcaaggcctccccgcatgccccggacccctcagccttctcctacgctccacctggtcacccactgcccctgggcctccatgacactgcccggcccgtcctgccgcgcccacccaccatctccaacccgcctcccctcatctcctctgccaagcaccccagcgtcctcgagaggcaaataggtgccatctcccaaggaatgtcggtccagctccacgtcccgtactcagagcatgccaaggccccggtgggccctgtcaccatggggctgcccctgcccatggaccccaaaaagctggcacccttcagcggagtgaagcaggagcagctgtccccacggggccaggctgggccaccggagagcctgggggtgcccacagcccaggaggcgtccgtgctgagagggacagctctgggctcagttccgggcggaagcatcaccaaaggcattcccagcacacgggtgccctcggacagcgccatcacataccgcggctccatcacccacggcacgccagctgacgtcctgtacaagggcaccatcaccaggatcatcggcgaggacagcccgagtcgcttggaccgcggccgggaggacagcctgcccaagggccacgtcatctacgaaggcaagaagggccacgtcttgtcctatgagggtggcatgtctgtgacccagtgctccaaggaggacggcagaagcagctcaggacccccccatgagacggccgcccccaagcgcacctatgacatgatggagggccgcgtgggcagagccatctcctcagccagcatcgaaggtctcatgggccgtgccatcccgccggagcgacacagcccccaccacctcaaagagcagcaccacatccgcgggtccatcacacaagggatccctcggtcctacgtggaggcacaggaggactacctgcgtcgggaggccaagctcctaaagcgggagggcacgcctccgcccccaccgccctcacgggacctgaccgaggcctacaagacgcaggccctgggccccctgaagctgaagccggcccatgagggcctggtggccacggtgaaggaggcgggccgctccatccatgagatcccgcgcgaggagctgcggcacacgcccgagctgcccctggccccgcggccgctcaaggagggctccatcacgcagggcaccccgctcaagtacgacaccggcgcgtccaccactggctccaaaaagcacgacgtacgctccctcatcggcagccccggccggacgttcccacccgtgcacccgctggatgtgatggccgacgcccgggcactggaacgtgcctgctacgaggagagcctgaagagccggccagggaccgccagcagctcggggggctccattgcgcgcggcgccccggtcattgtgcctgagctgggtaagccgcggcagagccccctgacctatgaggaccacggggcaccctttgccggccacctcccacgaggttcgcccgtgaccatgcgggagcccacgccgcgcctgcaggagggcagcctttcgtccagcaaggcatcccaggaccgaaagctgacgtcgacgcctcgtgagatcgccaagtccccgcacagcaccgtgcccgagcaccacccacaccccatctcgccctatgagcacctgcttcggggcgtgagtggcgtggacctgtatcgcagccacatccccctggccttcgaccccacctccataccccgcggcatccctctggacgcagccgctgcctactacctgccccgacacctggcccccaaccccacctacccgcacctgtacccaccctacctcatccgcggctaccccgacacggcggcgctggagaaccggcagaccatcatcaatgactacatcacctcgcagcagatgcaccacaacacggccaccgccatggcccagcgagctgatatgctgaggggcctctcgccccgcgagtcctcgctggcactcaactacgctgcgggtccccgaggcatcatcgacctgtcccaagtgccacacctgcctgtgctcgtgcccccgacaccaggcaccccagccaccgccatggaccgccttgcctacctccccaccgcgccccagcccttcagcagccgccacagcagctccccactctccccaggaggtccaacacacttgacaaaaccaaccaccacgtcctcgtccgagcgggagcgagaccgggatcgagagcgggaccgggatcgggagcgggaaaagtccatcctcacgtccaccacgacggtggagcacgcacccatctggagacctggtacagagcagagcagcggcagcagcggcagcagcggcgggggtgggggcagcagcagccgccccgcctcccactcccatgcccaccagcactcgcccatctcccctcggacccaggatgccctccagcagagacccagtgtgcttcacaacacaggcatgaagggtatcatcaccgctgtggagcccagcaagcccacggtcctgaggtccacctccacctcctcacccgttcgcccagctgccacattcccacctgccacccactgcccactgggcggcaccctcgatggggtctaccctaccctcatggagcccgtcttgctgcccaaggaggccccccgggtcgcccggccagagcggccccgagcagacaccggccatgccttcctcgccaagcccccagcccgctccgggctggagcccgcctcctcccccagcaagggctcggagccccggcccctagtgcctcctgtctctggccacgccaccatcgcccgcacccctgcgaagaacctcgcacctcaccacgccagcccggacccgccggcgccacctgcctcggcctcggacccgcaccgggaaaagactcaaagtaaacccttttccatccaggaactggaactccgttctctgggttaccacggcagcagctacagccccgaaggggtggagcccgtcagccctgtgagctcacccagtctgacccacgacaaggggctccccaagcacctggaagagctcgacaagagccacctggagggggagctgcggcccaagcagccaggccccgtgaagcttggcggggaggccgcccacctcccacacctgcggccgctgcctgagagccagccctcgtccagcccgctgctccagaccgccccaggggtcaaaggtcaccagcgggtggtcaccctggcccagcacatcagtgaggtcatcacacaggactacacccggcaccacccacagcagctcagcgcacccctgcccgcccccctctactccttccctggggccagctgccccgtcctggacctccgccgcccacccagtgacctctacctcccgcccccggaccatggtgccccggcccgtggctccccccacagcgaagggggcaagaggtctccagagccaaacaagacgtcggtcttgggtggtggtgaggacggtattgaacctgtgtccccaccggagggcatgacggagccagggcactcccggagtgctgtgtacccgctgctgtaccgggatggggaacagacggagcccagcaggatgggctccaagtctccaggcaacaccagccagccgccagccttcttcagcaagctgaccgagagcaactccgccatggtcaagtccaagaagcaagagatcaacaagaagctgaacacccacaaccggaatgagcctgaatacaatatcagccagcctgggacggagatcttcaatatgcccgccatcaccggaacaggccttatgacctatagaagccaggcggtgcaggaacatgccagcaccaacatggggctggaggccataattagaaaggcactcatgggtaaatatgaccagtgggaagagtccccgccgctcagcgccaatgcttttaaccctctgaatgccagtgccagcctgcccgctgctatgcccataaccgctgctgacggacggagtgaccacacactcacctcgccaggtggcggcgggaaggccaaggtctctggcagacccagcagccgaaaagccaagtccccggccccgggcctggcatctggggaccggccaccctctgtctcctcagtgcactcggagggagactgcaaccgccggacgccgctcaccaaccgcgtgtgggaggacaggccctcgtccgcaggttccacgccattcccctacaaccccctgatcatgcggctgcaggcgggtgtcatggcttccccacccccaccgggcctccccgcgggcagcgggcccctcgctggcccccaccacgcctgggacgaggagcccaagccactgctctgctcgcagtacgagacactctccgacagcgagtgactcagaacagggcgggggggggcgggcggtgtcaggtcccagcgagccacaggaacggccctgcaggagcggggcggctgccgactcccccaaccaaggaaggagcccctgagtccgcctgcgcctccatccatctgtccgtccagagccggcatccttgcctgtctaaagccttaactaagactcccgccccgggctggccctgtgcagaccttactcaggggatgtttacctggtgctcgggaagggaggggaaggggccggggagggggcacggcaggcgtgtggcagccacacacaggcggccagggcggccagggacccaaagcaggatgaccacgcacctccacgccactgcctcccccgaatgcatttggaaccaaagtctaaactgagctcgcagcccccgcgccctccctccgcctcccatcccgcttagcgctctggacagatggacgcaggccctgtccagcccccagtgcgctcgttccggtccccacagactgccccagccaacgagattgctggaaaccaagtcaggccaggtgggcggacaaaagggccaggtgcggcctggggggaacggatgctccgaggactggactgtttttttcacacatcgttgccgcagcggtgggaaggaaaggcagatgtaaatgatgtgttggtttacagggtatatttttgataccttcaatgaattaattcagatgttttacgcaaggaaggacttacccagtattactgctgctgtgcttttgatctctgcttaccgttcaagaggcgtgtgcaggccgacagtcggtgaccccatcactcgcaggaccaagggggcggggactgctcgtcacgccccgctgtgtcctccctccctcccttccttgggcagaatgaattcgatgcgtattctgtggccgccatttgcgcagggtggtggtattctgtcatttacacacgtcgttctaattaaaaagcgaattatactccaaaaaaaaaaaaaaaaaaa

SEQ ID NO: 204 - protein, 2517 aa, Homo sapiens
MSGSTQLVAQTWRATEPRYPPHSLSYPVQIARTHTDVGLLEYQHHSRDYASHLSPGSIIQPQRRRPSLLSEFQPGNERSQELHLRPESHSYLPELGKSEMEFIESKRPRLELLPDPLLRPSPLLATGQPAGSEDLTKDRSLTGKLEPVSPPSPPHTDPELELVPPRLSKEELIQNMDRVDREITMVEQQISKLKKKQQQLEEEAAKPPEPEKPVSPPPIESKHRSLVQIIYDENRKKAEAAHRILEGLGPQVELPLYNQPSDTRQYHENIKINQAMRKKLILYFKRRNHARKQWKQKFCQRYDQLMEALEKKVERIENNPRRRAKESKVREYYEKQFPEIRKQRELQERMQSRVGQRGSGLSMSAARSEHEVSEIIDGLSEQENLEKQMRQLAVIPPMLYDADQQRIKFINMNGLMADPMKVYKDRQVMNMWSEQEKETFREKFMQHPKNFGLIASFLERKTVAECVLYYYLTKKNENYKSLVRRSYRRRGKSQQQQQQQQQQQQQQQQQPMPRSSQEEKDEKEKEKEAEKEEEKPEVENDKEDLLKEKTDDTSGEDNDEKEAVASKGRKTANSQGRRKGRITRSMANEANSEEAITPQQSAELASMELNESSRWTEEEMETAKKGLLEHGRNWSAIARMVGSKTVSQCKNFYFNYKKRQNLDEILQQHKLKMEKERNARRKKKKAPAAASEEAAFPPVVEDEEMEASGVSGNEEEMVEEAEALHASGNEVPRGECSGPATVNNSSDTESIPSPHTEAAKDTGQNGPKPPATLGADGPPPGPPTPPRRTSRAPIEPTPASEATGAPTPPPAPPSPSAPPPVVPKEEKEEETAAAPPVEEGEEQKPPAAEELAVDTGKAEEPVKSECTEEAEEGPAKGKDAEAAEATAEGALKAEKKEGGSGRATTAKSSGAPQDSDSSATCSADEVDEAEGGDKNRLLSPRPSLLTPTGDPRANASPQKPLDLKQLKQRAAAIPPIQVTKVHEPPREDAAPTKPAPPAPPPPQNLQPESDAPQQPGSSPRGKSRSPAPPADKEAFAAEAQKLPGDPPCWTSGLPFPVPPREVIKASPHAPDPSAFSYAPPGHPLPLGLHDTARPVLPRPPTISNPPPLISSAKHPSVLERQIGAISQGMSVQLHVPYSEHAKAPVGPVTMGLPLPMDPKKLAPFSGVKQEQLSPRGQAGPPESLGVPTAQEASVLRGTALGSVPGGSITKGIPSTRVPSDSAITYRGSITHGTPADVLYKGTITRIIGEDSPSRLDRGREDSLPKGHVIYEGKKGHVLSYEGGMSVTQCSKEDGRSSSGPPHETAAPKRTYDMMEGRVGRAISSASIEGLMGRAIPPERHSPHHLKEQHHIRGSITQGIPRSYVEAQEDYLRREAKLLKREGTPPPPPPSRDLTEAYKTQALGPLKLKPAHEGLVATVKEAGRSIHEIPREELRHTPELPLAPRPLKEGSITQGTPLKYDTGASTTGSKKHDVRSLIGSPGRTFPPVHPLDVMADARALERACYEESLKSRPGTASSSGGSIARGAPVIVPELGKPRQSPLTYEDHGAPFAGHLPRGSPVTMREPTPRLQEGSLSSSKASQDRKLTSTPREIAKSPHSTVPEHHPHPISPYEHLLRGVSGVDLYRSHIPLAFDPTSIPRGIPLDAAAAYYLPRHLAPNPTYPHLYPPYLIRGYPDTAALENRQTIINDYITSQQMHHNTATAMAQRADMLRGLSPRESSLALNYAAGPRGIIDLSQVPHLPVLVPPTPGTPATAMDRLAYLPTAPQPFSSRHSSSPLSPGGPTHLTKPTTTSSSERERDRDRERDRDREREKSILTSTTTVEHAPIWRPGTEQSSGSSGSSGGGGGSSSRPASHSHAHQHSPISPRTQDALQQRPSVLHNTGMKGIITAVEPSKPTVLRSTSTSSPVRPAATFPPATHCPLGGTLDGVYPTLMEPVLLPKEAPRVARPERPRADTGHAFLAKPPARSGLEPASSPSKGSEPRPLVPPVSGHATIARTPAKNLAPHHASPDPPAPPASASDPHREKTQSKPFSIQELELRSLGYHGSSYSPEGVEPVSPVSSPSLTHDKGLPKHLEELDKSHLEGELRPKQPGPVKLGGEAAHLPHLRPLPESQPSSSPLLQTAPGVKGHQRVVTLAQHISEVITQDYTRHHPQQLSAPLPAPLYSFPGASCPVLDLRRPPSDLYLPPPDHGAPARGSPHSEGGKRSPEPNKTSVLGGGEDGIEPVSPPEGMTEPGHSRSAVYPLLYRDGEQTEPSRMGSKSPGNTSQPPAFFSKLTESNSAMVKSKKQEINKKLNTHNRNEPEYNISQPGTEIFNMPAITGTGLMTYRSQAVQEHASTNMGLEAIIRKALMGKYDQWEESPPLSANAFNPLNASASLPAAMPITAADGRSDHTLTSPGGGGKAKVSGRPSSRKAKSPAPGLASGDRPPSVSSVHSEGDCNRRTPLTNRVWEDRPSSAGSTPFPYNPLIMRLQAGVMASPPPPGLPAGSGPLAGPHHAWDEEPKPLLCSQYETLSDSE

SEQ ID NO: 205 - DNA, 2328 bp, Homo sapiens
  CDS (234)...(1130): CDK2 variant 1
ggaagcagggcggggcctctggtggcggtcgggaactcggtgggaggcggcaacattgtttcaagttggccaaattgacaagagcgagaggtatactgcgttccatcccgacccggggccacggtactgggccctgtttccccctcctcggcccccgagagccagggtccgccttctgcagggttcccaggcccccgctccagggccgggctgacccgactcgctggcgcttcatggagaacttccaaaaggtggaaaagatcggagagggcacgtacggagttgtgtacaaagccagaaacaagttgacgggagaggtggtggcgcttaagaaaatccgcctggacactgagactgagggtgtgcccagtactgccatccgagagatctctctgcttaaggagcttaaccatcctaatattgtcaagctgctggatgtcattcacacagaaaataaactctacctggtttttgaatttctgcaccaagatctcaagaaattcatggatgcctctgctctcactggcattcctcttcccctcatcaagagctatctgttccagctgctccagggcctagctttctgccattctcatcgggtcctccaccgagaccttaaacctcagaatctgcttattaacacagagggggccatcaagctagcagactttggactagccagagcttttggagtccctgttcgtacttacacccatgaggtggtgaccctgtggtaccgagctcctgaaatcctcctgggctgcaaatattattccacagctgtggacatctggagcctgggctgcatctttgctgagatggtgactcgccgggccctattccctggagattctgagattgaccagctcttccggatctttcggactctggggaccccagatgaggtggtgtggccaggagttacttctatgcctgattacaagccaagtttccccaagtgggcccggcaagattttagtaaagttgtacctcccctggatgaagatggacggagcttgttatcgcaaatgctgcactacgaccctaacaagcggatttcggccaaggcagccctggctcaccctttcttccaggatgtgaccaagccagtaccccatcttcgactctgatagccttcttgaagcccccagccctaatctcaccctctcctccagtgtgggcttgaccaggcttggccttgggctatttggactcaggtgggccctctgaacttgccttaaacactcaccttctagtcttggccagccaactctgggaatacaggggtgaaaggggggaaccagtgaaaatgaaaggaagtttcagtattagatgcacttaagttagcctccaccaccctttcccccttctcttagttattgctgaagagggttggtataaaaataattttaaaaaagccttcctacacgttagatttgccgtaccaatctctgaatgccccataattattatttccagtgtttgggatgaccaggatcccaagcctcctgctgccacaatgtttataaaggccaaatgatagcgggggctaagttggtgcttttgagaaccaagtaaaacaaaaccactgggaggagtctattttaaagaattcggttgaaaaaatagatccaatcagtttataccctagttagtgttttgcctcacctaataggctgggagactgaagactcagcccgggtggggctgcagaaaaatgattggccccagtccccttgtttgtcccttctacaggcatgaggaatctgggaggccctgagacagggattgtgcttcattccaatctattgcttcaccatggccttatgaggcaggtgagagatgtttgaatttttctcttccttttagtattcttagttgttcagttgccaaggatccctgatcccattttcctctgacgtccacctcctaccccataggagttagaagttagggtttaggcatcattttgagaatgctgacactttttcagggctgtgattgagtgagggcatgggtaaaaatatttctttaaaagaaggatgaacaattatatttatatttcaggttatatccaatagtagagttggcttttttttttttttttttggtcatagtgggtggatttgttgccatgtgcaccttggggttttgtaatgacagtgctaaaaaaaaaaaagcatttttttttatgatttgtctctgtcacccttgtccttgagtgctcttgctattaacgttatttgtaatttagtttgtagctcattaaaaaaatgtgcctagttttataaaaaaaaaaaaaaaaaaaaaaaaaaaaaaaaaaaaaaa

SEQ ID NO: 206 - protein, 298 aa, Homo sapiens
MENFQKVEKIGEGTYGVVYKARNKLTGEVVALKKIRLDTETEGVPSTAIREISLLKELNHPNIVKLLDVIHTENKLYLVFEFLHQDLKKFMDASALTGIPLPLIKSYLFQLLQGLAFCHSHRVLHRDLKPQNLLINTEGAIKLADFGLARAFGVPVRTYTHEVVTLWYRAPEILLGCKYYSTAVDIWSLGCIFAEMVTRRALFPGDSEIDQLFRIFRTLGTPDEVVWPGVTSMPDYKPSFPKWARQDFSKVVPPLDEDGRSLLSQMLHYDPNKRISAKAALAHPFFQDVTKPVPHLRL

SEQ ID NO: 207 - DNA, 2226 bp, Homo sapiens
  CDS (234)...(1028): CDK2 variant 2
ggaagcagggcggggcctctggtggcggtcgggaactcggtgggaggcggcaacattgtttcaagttggccaaattgacaagagcgagaggtatactgcgttccatcccgacccggggccacggtactgggccctgtttccccctcctcggcccccgagagccagggtccgccttctgcagggttcccaggcccccgctccagggccgggctgacccgactcgctggcgcttcatggagaacttccaaaaggtggaaaagatcggagagggcacgtacggagttgtgtacaaagccagaaacaagttgacgggagaggtggtggcgcttaagaaaatccgcctggacactgagactgagggtgtgcccagtactgccatccgagagatctctctgcttaaggagcttaaccatcctaatattgtcaagctgctggatgtcattcacacagaaaataaactctacctggtttttgaatttctgcaccaagatctcaagaaattcatggatgcctctgctctcactggcattcctcttcccctcatcaagagctatctgttccagctgctccagggcctagctttctgccattctcatcgggtcctccaccgagaccttaaacctcagaatctgcttattaacacagagggggccatcaagctagcagactttggactagccagagcttttggagtccctgttcgtacttacacccatgaggtgactcgccgggccctattccctggagattctgagattgaccagctcttccggatctttcggactctggggaccccagatgaggtggtgtggccaggagttacttctatgcctgattacaagccaagtttccccaagtgggcccggcaagattttagtaaagttgtacctcccctggatgaagatggacggagcttgttatcgcaaatgctgcactacgacccttacaagaggatttcggccaaggcagccctggctcaccctttcttccaggatgtgaccaagccagtaccccatcttcgactctgatagccttcttgaagcccccagccctaatctcaccctctcctccagtgtgggcttgaccaggcttggccttgggctatttggactcaggtgggccctctgaacttgccttaaacactcaccttctagtcttggccagccaactctgggaatacaggggtgaaaggggggaaccagtgaaaatgaaaggaagtttcagtattagatgcacttaagttagcctccaccaccctttcccccttctcttagttattgctgaagagggttggtataaaaataattttaaaaaagccttcctacacgttagatttgccgtaccaatctctgaatgccccataattattatttccagtgtttgggatgaccaggatcccaagcctcctgctgccacaatgtttataaaggccaaatgatagcgggggctaagttggtgcttttgagaaccaagtaaaacaaaaccactgggaggagtctattttaaagaattcggttgaaaaaatagatccaatcagtttataccctagttagtgttttgcctcacctaataggctgggagactgaagactcagcccgggtggggctgcagaaaaatgattggccccagtccccttgtttgtcccttctacaggcatgaggaatctgggaggccctgagacagggattgtgcttcattccaatctattgcttcaccatggccttatgaggcaggtgagagatgtttgaatttttctcttccttttagtattcttagttgttcagttgccaaggatccctgatcccattttcctctgacgtccacctcctaccccataggagttagaagttagggtttaggcatcattttgagaatgctgacactttttcagggctgtgattgagtgagggcatgggtaaaaatatttctttaaaagaaggatgaacaattatatttatatttcaggttatatccaatagtagagttggcttttttttttttttttttggtcatagtgggtggatttgttgccatgtgcaccttggggttttgtaatgacagtgctaaaaaaaaaaaagcatttttttttatgatttgtctctgtcacccttgtccttgagtgctcttgctattaacgttatttgtaatttagtttgtagctcattaaaaaaatgtgcctagttttataaaaaaaaaaaaaaaaaaaaaaaaaaaaaaaaaaaaaaa

SEQ ID NO: 208 - protein, 264 aa, Homo sapiens
MENFQKVEKIGEGTYGVVYKARNKLTGEVVALKKIRLDTETEGVPSTAIREISLLKELNHPNIVKLLDVIHTENKLYLVFEFLHQDLKKFMDASALTGIPLPLIKSYLFQLLQGLAFCHSHRVLHRDLKPQNLLINTEGAIKLADFGLARAFGVPVRTYTHEVTRRALFPGDSEIDQLFRIFRTLGTPDEVVWPGVTSMPDYKPSFPKWARQDFSKVVPPLDEDGRSLLSQMLHYDPYKRISAKAALAHPFFQDVTKPVPHLRL

SEQ ID NO: 209 - DNA, 2886 bp, Homo sapiens
  CDS (91)...(1065): CDK7
caagctgcgctcgtctctcggctggggagctccgtgtcgcaccgggttcttgggctggccgtgtccttctccctcggtcgccactggcccatgagtccccatggcgacggcaggggccaggcccaggggcgggcagtccgagtggggctgcggcgctccgggggcatccgcggcggcgtggcggtgttcgccgccgtggccgcagtgttcaccttcaccctgcccccttcggtaccggggggagactccggggaactgatcacagccgcacatgagcttggagttgcccatcctcctggctatcctttgttcacgctggtggctaaactggcaattacactgtttccttttggttcaattgcctaccgcgtcaatcttctctgtggcttatttggagcagtagctgcatcattactttttttcaccgttttcaggctttctggctcatctgctggaggaatccttgctgcgggggtgttttcattttctcgtctaacatggcagtggtccattgcagcagaggtttttagcttaaacaatctctttgtggggctgcttatggctcttactgtacattttgaggaagcagcaactgctaaggagagatcaaaggtagctaaaattggtgctttctgctgtggccttagtttatgtaaccagcacacaataatactctatgttttgtgcataataccttggattctctttcaacttttaaaaaagaaggaactctccctgggctctttgttgaagttgagcctgtacttctctgctggtttgctgccctatgtccaccttcccatctcatcttaccttaatcacgcccggtggacctggggagaccagacaacactgcaaggatttttgacacattttctcagggaagaatatggaaccttcagcctggccaaatctgaaataggatccagtatgtctgaaatactgctttctcaagtaacaaatatgaggaccgaactctcattcaacatccaagcccttgcagtttgtgcaaatatatgtttagcaacaaagtggaacgattctggatgcagagcaatgcagtagtggccgtcctcgctggcattggtttggctgcagttgtgtctgagactaaccgagtgctgaatagcaatgggcttcagtgtctggaatggctttctgcaactctttttgtagtttaccaaatatattctaattacagtgtttgtgaccaaaggaccaactatgtgattgataagttcgcaaagaaccttctcacctctatgcctcatgatgcaattatcttactcagaggagatttgccaggaaattctctccgttacatgcattactgtgaggggttgaggcctgacatttcattagtggatcaggaaatgatgacttacgagtggtatttacccaagatggcaaagcacttgccaggtgtcaactttcctgggaaccggtggaatcctgtggaaggaatattacctagtggaatggtcacatttaatctttatcattttcttgaagtaaataaacaaaaagaaacatttgtttgcataggaattcatgaaggcgacccaacctggaaaaagaactattcactttggccatgggggtcttgtgacaaattagttcctttggagattgtattcaaccctgaggaatggattaaacttacaaaaagtatctataactggaccgaagaatatggaaggtttgatccatcttcttgggaatctgtggccaatgaagaaatgtggcaagcgaggatgaaaacaccgttcttcatctttaacctggcagaaactgctcacatgccttcaaaagtgaaagctcaactctacgctcaagcatatgacctttataaggagattgtctatttacaaaaggagcacccagtgaattggcacaagaactatgccatcgcctgtgagcggatgctgcgtcttcaggcaagagatgcagatcctgaagtgctgttatcggaaaccatcagacatttccgtctgtactctcagaaagcaccgaatgacccacagcaagctgatattttaggtgctctaaagcacctaagaaaagaactgcaaagtctgagaaataggaaaaatgtctgagacagcaaaatatgaaaaacctgctcatcgttcagcttccaaaattctgaagtctggaagtttttccttcaagaaaagaaactgcataaaaaatttaaaactaagtcatctcccagatataagtatcatggtccagcagtactgtttaatggggtattcagtgactaaggtctgctatttatgcaaaattctgtttatcccgtgttaccaaattaccatttcagtgagaagcttttgaaaagtcttctgacttccagtctttcaccagatgactgcactggattagattctagaagagaatgaaccattttcatataactaaatattggtcatgaactgtgtaagggccatgcttattgggatcagttttaaagttaaattcttttgatattaataccagaccaaagacattttctgtttcctggaaaaaaaaaatgaatcatgttaggctttaggtgagagtacattttttacaaagtagctatagttgttacatagtcttacacttcaagctaaacaccaaatgggtgatattttgaaaaaagtttgtgttttactgtcttagatcgttcttggaaatcactaaaaaaaaaaaaagttaatttgatgtttgcttatttcagttgcagaaactggcgagtaaaaaagattttgcatttacttaattaattttatatttatgttttatttctatttggactcagagatctagacccaataattagtaggctcctgctgccaaaatgcaaaggggaaaaaaaggcagggattgggggggatggggaag

SEQ ID NO: 210 - protein, 324 aa, Homo sapiens
MSPHGDGRGQAQGRAVRVGLRRSGGIRGGVAVFAAVAAVFTFTLPPSVPGGDSGELITAAHELGVAHPPGYPLFTLVAKLAITLFPFGSIAYRVNLLCGLFGAVAASLLFFTVFRLSGSSAGGILAAGVFSFSRLTWQWSIAAEVFSLNNLFVGLLMALTVHFEEAATAKERSKVAKIGAFCCGLSLCNQHTIILYVLCIIPWILFQLLKKKELSLGSLLKLSLYFSAGLLPYVHLPISSYLNHARWTWGDQTTLQGFLTHFLREEYGTFSLAKSEIGSSMSEILLSQVTNMRTELSFNIQALAVCANICLATKWNDSGCRAMQ

SEQ ID NO: 211 - DNA, 1866 bp, Homo sapiens
  CDS (73)...(1212): ERK1
cgttcctcggcgccgccggggccccagagggcagcggcagcaacagcagcagcagcagcagcgggagtggagatggcggcggcggcggctcaggggggcgggggcggggagccccgtagaaccgagggggtcggcccgggggtcccgggggaggtggagatggtgaaggggcagccgttcgacgtgggcccgcgctacacgcagttgcagtacatcggcgagggcgcgtacggcatggtcagctcggcctatgaccacgtgcgcaagactcgcgtggccatcaagaagatcagccccttcgaacatcagacctactgccagcgcacgctccgggagatccagatcctgctgcgcttccgccatgagaatgtcatcggcatccgagacattctgcgggcgtccaccctggaagccatgagagatgtctacattgtgcaggacctgatggagactgacctgtacaagttgctgaaaagccagcagctgagcaatgaccatatctgctacttcctctaccagatcctgcggggcctcaagtacatccactccgccaacgtgctccaccgagatctaaagccctccaacctgctcagcaacaccacctgcgaccttaagatttgtgatttcggcctggcccggattgccgatcctgagcatgaccacaccggcttcctgacggagtatgtggctacgcgctggtaccgggccccagagatcatgctgaactccaagggctataccaagtccatcgacatctggtctgtgggctgcattctggctgagatgctctctaaccggcccatcttccctggcaagcactacctggatcagctcaaccacattctgggcatcctgggctccccatcccaggaggacctgaattgtatcatcaacatgaaggcccgaaactacctacagtctctgccctccaagaccaaggtggcttgggccaagcttttccccaagtcagactccaaagcccttgacctgctggaccggatgttaacctttaaccccaataaacggatcacagtggaggaagcgctggctcacccctacctggagcagtactatgacccgacggatgagccagtggccgaggagcccttcaccttcgccatggagctggatgacctacctaaggagcggctgaaggagctcatcttccaggagacagcacgcttccagcccggagtgctggaggccccctagcccagacagacatctctgcaccctggggcctggacctgcctcctgcctgcccctctcccgccagactgttagaaaatggacactgtgcccagcccggaccttggcagcccaggccggggtggagcatgggcctggccacctctctcctttgctgaggcctccagcttcaggcaggccaaggccttctcctccccacccgccctccccacggggcctcgggagctcaggtggccccagttcaatctcccgctgctgctgctgctgcgcccttaccttccccagcgtcccagtctctggcagttctggaatggaagggttctggctgccccaacctgctgaagggcagaggtggagggtggggggcgctgagtagggactcagggccatgcctgcccccctcatctcattcaaaccccaccctagtttccctgaaggaacattccttagtctcaagggctagcatccctgaggagccaggccgggccgaatcccctccctgtcaaagctgtcacttcgcgtgccctcgctgcttctgtgtgtggtgagcagaagtggagctggggggcgtggagagcccggcgcccctgccacctccctgacccgtctaatatataaatatagagatgtgtctatggctgaaaaaaaaaaaaaaaa

SEQ ID NO: 212 - protein, 379 aa, Homo sapiens
MAAAAAQGGGGGEPRRTEGVGPGVPGEVEMVKGQPFDVGPRYTQLQYIGEGAYGMVSSAYDHVRKTRVAIKKISPFEHQTYCQRTLREIQILLRFRHENVIGIRDILRASTLEAMRDVYIVQDLMETDLYKLLKSQQLSNDHICYFLYQILRGLKYIHSANVLHRDLKPSNLLSNTTCDLKICDFGLARIADPEHDHTGFLTEYVATRWYRAPEIMLNSKGYTKSIDIWSVGCILAEMLSNRPIFPGKHYLDQLNHILGILGSPSQEDLNCIINMKARNYLQSLPSKTKVAWAKLFPKSDSKALDLLDRMLTFNPNKRITVEEALAHPYLEQYYDPTDEPVAEEPFTFAMELDDLPKERLKELIFQETARFQPGVLEAP

SEQ ID NO: 213 - DNA, 1759 bp, Homo sapiens
  CDS (255)...(1457): ERK2
cccctgcctctcggactcgggctgcggcgtcagccttcttcgggcctcggcagcggtagcggctcgctcgcctcagccccagcgcccctcggctaccctcggcccaggcccgcagcgccgcccgccctcggccgccccgacgccggcctgggccgcggccgcagccccgggctcgcgtaggcgccgaccgctcccggcccgccccctatgggccccggctagaggcgccgccgccgccggcccgcggagccccgatgctggcccggaggaagccggtgctgccggcgctcaccatcaaccctaccatcgccgagggcccatcccctaccagcgagggcgcctccgaggcaaacctggtggacctgcagaagaagctggaggagctggaacttgacgagcagcagaagaagcggctggaagcctttctcacccagaaagccaaggtcggcgaactcaaagacgatgacttcgaaaggatctcagagctgggcgcgggcaacggcggggtggtcaccaaagtccagcacagaccctcgggcctcatcatggccaggaagctgatccaccttgagatcaagccggccatccggaaccagatcatccgcgagctgcaggtcctgcacgaatgcaactcgccgtacatcgtgggcttctacggggccttctacagtgacggggagatcagcatttgcatggaacacatggacggcggctccctggaccaggtgctgaaagaggccaagaggattcccgaggagatcctggggaaagtcagcatcgcggttctccggggcttggcgtacctccgagagaagcaccagatcatgcaccgagatgtgaagccctccaacatcctcgtgaactctagaggggagatcaagctgtgtgacttcggggtgagcggccagctcatagactccatggccaactccttcgtgggcacgcgctcctacatggctccggagcggttgcagggcacacattactcggtgcagtcggacatctggagcatgggcctgtccctggtggagctggccgtcggaaggtaccccatccccccgcccgacgccaaagagctggaggccatctttggccggcccgtggtcgacggggaagaaggagagcctcacagcatctcgcctcggccgaggccccccgggcgccccgtcagcggtcacgggatggatagccggcctgccatggccatctttgaactcctggactatattgtgaacgagccacctcctaagctgcccaacggtgtgttcacccccgacttccaggagtttgtcaataaatgcctcatcaagaacccagcggagcgggcggacctgaagatgctcacaaaccacaccttcatcaagcggtccgaggtggaagaagtggattttgccggctggttgtgtaaaaccctgcggctgaaccagcccggcacacccacgcgcaccgccgtgtgacagtggccgggctccctgcgtcccgctggtgacctgcccaccgtccctgtccatgccccgcccttccagctgaggacaggctggcgcctccacccaccctcctgcctcacccctgcggagagcaccgtggcggggcgacagcgcatgcaggaacgggggtctcctctcctgcccgtcctggccggggtgcctctggggacgggcgacgctgctgtgtgtggtctcagaggctctgcttccttaggttacaaaacaaaacagggagagaaaaagcaaaaaaaaaaaaaaaaaaaaaaaaaaaa

SEQ ID NO: 214 - protein, 400 aa, Homo sapiens [sequence omitted]

SEQ ID NO: 215 - DNA, 1639 bp, Homo sapiens
  CDS (233)...(1534): GSK-3
atcatctatatgttaaatatccgtgccgatctgtcttgaaggagaaatatatcgcttgttttgttttttatagtatacaaaaggagtgaaaagccaagaggacgaagtctttttctttttcttctgtgggagaacttaatgctgcatttatcgttaacctaacaccccaacataaagacaaaaggaagaaaaggaggaaggaaggaaaaggtgattcgcgaagagagtgatcatgtcagggcggcccagaaccacctcctttgcggagagctgcaagccggtgcagcagccttcagcttttggcagcatgaaagttagcagagacaaggacggcagcaaggtgacaacagtggtggcaactcctgggcagggtccagacaggccacaagaagtcagctatacagacactaaagtgattggaaatggatcatttggtgtggtatatcaagccaaactttgtgattcaggagaactggtcgccatcaagaaagtattgcaggacaagagatttaagaatcgagagctccagatcatgagaaagctagatcactgtaacatagtccgattgcgttatttcttctactccagtggtgagaagaaagatgaggtctatcttaatctggtgctggactatgttccggaaacagtatacagagttgccagacactatagtcgagccaaacagacgctccctgtgatttatgtcaagttgtatatgtatcagctgttccgaagtttagcctatatccattcctttggaatctgccatcgggatattaaaccgcagaacctcttgttggatcctgatactgctgtattaaaactctgtgactttggaagtgcaaagcagctggtccgaggagaacccaatgtttcgtatatctgttctcggtactatagggcaccagagttgatctttggagccactgattatacctctagtatagatgtatggtctgctggctgtgtgttggctgagctgttactaggacaaccaatatttccaggggatagtggtgtggatcagttggtagaaataatcaaggtcctgggaactccaacaagggagcaaatcagagaaatgaacccaaactacacagaatttaaattccctcaaattaaggcacatccttggactaaggattcgtcaggaacaggacatttcacctcaggagtgcgggtcttccgaccccgaactccaccggaggcaattgcactgtgtagccgtctgctggagtatacaccaactgcccgactaacaccactggaagcttgtgcacattcattttttgatgaattacgggacccaaatgtcaaactaccaaatgggcgagacacacctgcactcttcaacttcaccactcaagaactgtcaagtaatccacctctggctaccatccttattcctcctcatgctcggattcaagcagctgcttcaacccccacaaatgccacagcagcgtcagatgctaatactggagaccgtggacagaccaataatgctgcttctgcatcagcttccaactccacctgaacagtcccgagcagccagctgcacaggaaaaaccaccagttacttgagtgtcactcagcaacactggtcacgtttggaaagaatattaaaaaaaaaaaaaaaaaa

SEQ ID NO: 216 - protein, 433 aa, Homo sapiens
MSGRPRTTSFAESCKPVQQPSAFGSMKVSRDKDGSKVTTVVATPGQGPDRPQEVSYTDTKVIGNGSFGVVYQAKLCDSGELVAIKKVLQDKRFKNRELQIMRKLDHCNIVRLRYFFYSSGEKKDEVYLNLVLDYVPETVYRVARHYSRAKQTLPVIYVKLYMYQLFRSLAYIHSFGICHRDIKPQNLLLDPDTAVLKLCDFGSAKQLVRGEPNVSYICSRYYRAPELIFGATDYTSSIDVWSAGCVLAELLLGQPIFPGDSGVDQLVEIIKVLGTPTREQIREMNPNYTEFKFPQIKAHPWTKDSSGTGHFTSGVRVFRPRTPPEAIALCSRLLEYTPTARLTPLEACAHSFFDELRDPNVKLPNGRDTPALFNFTTQELSSNPPLATILIPPHARIQAAASTPTNATAASDANTGDRGQTNNAASASASNST

SEQ ID NO: 217 - DNA, 1412 bp, Homo sapiens
  CDS (18)...(1301): JNK1 variant 1
attaattgcttgccatcatgagcagaagcaagcgtgacaacaatttttatagtgtagagattggagattctacattcacagtcctgaaacgatatcagaatttaaaacctataggctcaggagctcaaggaatagtatgcgcagcttatgatgccattcttgaaagaaatgttgcaatcaagaagctaagccgaccatttcagaatcagactcatgccaagcgggcctacagagagctagttcttatgaaatgtgttaatcacaaaaatataattggccttttgaatgttttcacaccacagaaatccctagaagaatttcaagatgtttacatagtcatggagctcatggatgcaaatctttgccaagtgattcagatggagctagatcatgaaagaatgtcctaccttctctatcagatgctgtgtggaatcaagcaccttcattctgctggaattattcatcgggacttaaagcccagtaatatagtagtaaaatctgattgcactttgaagattcttgacttcggtctggccaggactgcaggaacgagttttatgatgacgccttatgtagtgactcgctactacagagcacccgaggtcatccttggcatgggctacaaggaaaacgtggatttatggtctgtggggtgcattatgggagaaatggtttgccacaaaatcctctttccaggaagggactatattgatcagtggaataaagttattgaacagcttggaacaccatgtcctgaattcatgaagaaactgcaaccaacagtaaggacttacgttgaaaacagacctaaatatgctggatatagctttgagaaactcttccctgatgtccttttcccagctgactcagaacacaacaaacttaaagccagtcaggcaagggatttgttatccaaaatgctggtaatagatgcatctaaaaggatctctgtagatgaagctctccaacacccgtacatcaatgtctggtatgatccttctgaagcagaagctccaccaccaaagatccctgacaagcagttagatgaaagggaacacacaatagaagagtggaaagaattgatatataaggaagttatggacttggaggagagaaccaagaatggagttatacgggggcagccctctcctttaggtgcagcagtgatcaatggctctcagcatccatcatcatcgtcgtctgtcaatgatgtgtcttcaatgtcaacagatccgactttggcctctgatacagacagcagtctagaagcagcagctgggcctctgggctgctgtagatgactacttgggccatcggggggtgggagggatggggagtcggttagtcattgatagaactactttgaaaacaattcagtggtcttatttttgggtgatttttcaaaaaatgta

SEQ ID NO: 218 - protein, 427 aa, Homo sapiens
MSRSKRDNNFYSVEIGDSTFTVLKRYQNLKPIGSGAQGIVCAAYDAILERNVAIKKLSRPFQNQTHAKRAYRELVLMKCVNHKNIIGLLNVFTPQKSLEEFQDVYIVMELMDANLCQVIQMELDHERMSYLLYQMLCGIKHLHSAGIIHRDLKPSNIVVKSDCTLKILDFGLARTAGTSFMMTPYVVTRYYRAPEVILGMGYKENVDLWSVGCIMGEMVCHKILFPGRDYIDQWNKVIEQLGTPCPEFMKKLQPTVRTYVENRPKYAGYSFEKLFPDVLFPADSEHNKLKASQARDLLSKMLVIDASKRISVDEALQHPYINVWYDPSEAEAPPPKIPDKQLDEREHTIEEWKELIYKEVMDLEERTKNGVIRGQPSPLGAAVINGSQHPSSSSSVNDVSSMSTDPTLASDTDSSLEAAAGPLGCCR

SEQ ID NO: 219 - DNA, 1417 bp, Homo sapiens
  CDS (18)...(1172): JNK1 variant 2
attaattgcttgccatcatgagcagaagcaagcgtgacaacaatttttatagtgtagagattggagattctacattcacagtcctgaaacgatatcagaatttaaaacctataggctcaggagctcaaggaatagtatgcgcagcttatgatgccattcttgaaagaaatgttgcaatcaagaagctaagccgaccatttcagaatcagactcatgccaagcgggcctacagagagctagttcttatgaaatgtgttaatcacaaaaatataattggccttttgaatgttttcacaccacagaaatccctagaagaatttcaagatgtttacatagtcatggagctcatggatgcaaatctttgccaagtgattcagatggagctagatcatgaaagaatgtcctaccttctctatcagatgctgtgtggaatcaagcaccttcattctgctggaattattcatcgggacttaaagcccagtaatatagtagtaaaatctgattgcactttgaagattcttgacttcggtctggccaggactgcaggaacgagttttatgatgacgccttatgtagtgactcgctactacagagcacccgaggtcatccttggcatgggctacaaggaaaacgtggatttatggtctgtggggtgcattatgggagaaatggtttgccacaaaatcctctttccaggaagggactatattgatcagtggaataaagttattgaacagcttggaacaccatgtcctgaattcatgaagaaactgcaaccaacagtaaggacttacgttgaaaacagacctaaatatgctggatatagctttgagaaactcttccctgatgtccttttcccagctgactcagaacacaacaaacttaaagccagtcaggcaagggatttgttatccaaaatgctggtaatagatgcatctaaaaggatctctgtagatgaagctctccaacacccgtacatcaatgtctggtatgatccttctgaagcagaagctccaccaccaaagatccctgacaagcagttagatgaaagggaacacacaatagaagagtggaaagaattgatatataaggaagttatggacttggaggagagaaccaagaatggagttatacgggggcagccctctcctttagcacaggtgcagcagtgatcaatggctctcagcatccatcatcatcgtcgtctgtcaatgatgtgtcttcaatgtcaacagatccgactttggcctctgatacagacagcagtctagaagcagcagctgggcctctgggctgctgtagatgactacttgggccatcggggggtgggagggatggggagtcggttagtcattgatagaactactttgaaaacaattcagtggtcttatttttgggtgatttttcaaaaaatgta

SEQ ID NO: 220 - protein, 384 aa, Homo sapiens
MSRSKRDNNFYSVEIGDSTFTVLKRYQNLKPIGSGAQGIVCAAYDAILERNVAIKKLSRPFQNQTHAKRAYRELVLMKCVNHKNIIGLLNVFTPQKSLEEFQDVYIVMELMDANLCQVIQMELDHERMSYLLYQMLCGIKHLHSAGIIHRDLKPSNIVVKSDCTLKILDFGLARTAGTSFMMTPYVVTRYYRAPEVILGMGYKENVDLWSVGCIMGEMVCHKILFPGRDYIDQWNKVIEQLGTPCPEFMKKLQPTVRTYVENRPKYAGYSFEKLFPDVLFPADSEHNKLKASQARDLLSKMLVIDASKRISVDEALQHPYINVWYDPSEAEAPPPKIPDKQLDEREHTIEEWKELIYKEVMDLEERTKNGVIRGQPSPLAQVQQ

SEQ ID NO: 221 - DNA, 1417 bp, Homo sapiens
  CDS (18)...(1172): JNK1 variant 3
attaattgcttgccatcatgagcagaagcaagcgtgacaacaatttttatagtgtagagattggagattctacattcacagtcctgaaacgatatcagaatttaaaacctataggctcaggagctcaaggaatagtatgcgcagcttatgatgccattcttgaaagaaatgttgcaatcaagaagctaagccgaccatttcagaatcagactcatgccaagcgggcctacagagagctagttcttatgaaatgtgttaatcacaaaaatataattggccttttgaatgttttcacaccacagaaatccctagaagaatttcaagatgtttacatagtcatggagctcatggatgcaaatctttgccaagtgattcagatggagctagatcatgaaagaatgtcctaccttctctatcagatgctgtgtggaatcaagcaccttcattctgctggaattattcatcgggacttaaagcccagtaatatagtagtaaaatctgattgcactttgaagattcttgacttcggtctggccaggactgcaggaacgagttttatgatgacgccttatgtagtgactcgctactacagagcacccgaggtcatccttggcatgggctacaaggaaaacgttgacatttggtcagttgggtgcatcatgggagaaatgatcaaaggtggtgttttgttcccaggtacagatcatattgatcagtggaataaagttattgaacagcttggaacaccatgtcctgaattcatgaagaaactgcaaccaacagtaaggacttacgttgaaaacagacctaaatatgctggatatagctttgagaaactcttccctgatgtccttttcccagctgactcagaacacaacaaacttaaagccagtcaggcaagggatttgttatccaaaatgctggtaatagatgcatctaaaaggatctctgtagatgaagctctccaacacccgtacatcaatgtctggtatgatccttctgaagcagaagctccaccaccaaagatccctgacaagcagttagatgaaagggaacacacaatagaagagtggaaagaattgatatataaggaagttatggacttggaggagagaaccaagaatggagttatacgggggcagccctctcctttagcacaggtgcagcagtgatcaatggctctcagcatccatcatcatcgtcgtctgtcaatgatgtgtcttcaatgtcaacagatccgactttggcctctgatacagacagcagtctagaagcagcagctgggcctctgggctgctgtagatgactacttgggccatcggggggtgggagggatggggagtcggttagtcattgatagaactactttgaaaacaattcagtggtcttatttttgggtgatttttcaaaaaatgta

SEQ ID NO: 222 - protein, 384 aa, Homo sapiens
MSRSKRDNNFYSVEIGDSTFTVLKRYQNLKPIGSGAQGIVCAAYDAILERNVAIKKLSRPFQNQTHAKRAYRELVLMKCVNHKNIIGLLNVFTPQKSLEEFQDVYIVMELMDANLCQVIQMELDHERMSYLLYQMLCGIKHLHSAGIIHRDLKPSNIVVKSDCTLKILDFGLARTAGTSFMMTPYVVTRYYRAPEVILGMGYKENVDIWSVGCIMGEMIKGGVLFPGTDHIDQWNKVIEQLGTPCPEFMKKLQPTVRTYVENRPKYAGYSFEKLFPDVLFPADSEHNKLKASQARDLLSKMLVIDASKRISVDEALQHPYINVWYDPSEAEAPPPKIPDKQLDEREHTIEEWKELIYKEVMDLEERTKNGVIRGQPSPLAQVQQ

SEQ ID NO: 223 - DNA, 1412 bp, Homo sapiens
  CDS (18)...(1301): JNK1 variant 4
attaattgcttgccatcatgagcagaagcaagcgtgacaacaatttttatagtgtagagattggagattctacattcacagtcctgaaacgatatcagaatttaaaacctataggctcaggagctcaaggaatagtatgcgcagcttatgatgccattcttgaaagaaatgttgcaatcaagaagctaagccgaccatttcagaatcagactcatgccaagcgggcctacagagagctagttcttatgaaatgtgttaatcacaaaaatataattggccttttgaatgttttcacaccacagaaatccctagaagaatttcaagatgtttacatagtcatggagctcatggatgcaaatctttgccaagtgattcagatggagctagatcatgaaagaatgtcctaccttctctatcagatgctgtgtggaatcaagcaccttcattctgctggaattattcatcgggacttaaagcccagtaatatagtagtaaaatctgattgcactttgaagattcttgacttcggtctggccaggactgcaggaacgagttttatgatgacgccttatgtagtgactcgctactacagagcacccgaggtcatccttggcatgggctacaaggaaaacgttgacatttggtcagttgggtgcatcatgggagaaatgatcaaaggtggtgttttgttcccaggtacagatcatattgatcagtggaataaagttattgaacagcttggaacaccatgtcctgaattcatgaagaaactgcaaccaacagtaaggacttacgttgaaaacagacctaaatatgctggatatagctttgagaaactcttccctgatgtccttttcccagctgactcagaacacaacaaacttaaagccagtcaggcaagggatttgttatccaaaatgctggtaatagatgcatctaaaaggatctctgtagatgaagctctccaacacccgtacatcaatgtctggtatgatccttctgaagcagaagctccaccaccaaagatccctgacaagcagttagatgaaagggaacacacaatagaagagtggaaagaattgatatataaggaagttatggacttggaggagagaaccaagaatggagttatacgggggcagccctctcctttaggtgcagcagtgatcaatggctctcagcatccatcatcatcgtcgtctgtcaatgatgtgtcttcaatgtcaacagatccgactttggcctctgatacagacagcagtctagaagcagcagctgggcctctgggctgctgtagatgactacttgggccatcggggggtgggagggatggggagtcggttagtcattgatagaactactttgaaaacaattcagtggtcttatttttgggtgatttttcaaaaaatgta

SEQ ID NO: 224 - protein, 427 aa, Homo sapiens
MSRSKRDNNFYSVEIGDSTFTVLKRYQNLKPIGSGAQGIVCAAYDAILERNVAIKKLSRPFQNQTHAKRAYRELVLMKCVNHKNIIGLLNVFTPQKSLEEFQDVYIVMELMDANLCQVIQMELDHERMSYLLYQMLCGIKHLHSAGIIHRDLKPSNIVVKSDCTLKILDFGLARTAGTSFMMTPYVVTRYYRAPEVILGMGYKENVDIWSVGCIMGEMIKGGVLFPGTDHIDQWNKVIEQLGTPCPEFMKKLQPTVRTYVENRPKYAGYSFEKLFPDVLFPADSEHNKLKASQARDLLSKMLVIDASKRISVDEALQHPYINVWYDPSEAEAPPPKIPDKQLDEREHTIEEWKELIYKEVMDLEERTKNGVIRGQPSPLGAAVINGSQHPSSSSSVNDVSSMSTDPTLASDTDSSLEAAAGPLGCCR

SEQ ID NO: 225 - DNA, 1942 bp, Homo sapiens
  CDS (50)...(1324): JNK2 variant 1
agggatctgaaacttgcccacccttcgggatattgcaggacgctgcatcatgagcgacagtaaatgtgacagtcagttttatagtgtgcaagtggcagactcaaccttcactgtcctaaaacgttaccagcagctgaaaccaattggctctggggcccaagggattgtttgtgctgcatttgatacagttcttgggataaatgttgcagtcaagaaactaagccgtccttttcagaaccaaactcatgcaaagagagcttatcgtgaacttgtcctcttaaaatgtgtcaatcataaaaatataattagtttgttaaatgtgtttacaccacaaaaaactctagaagaatttcaagatgtgtatttggttatggaattaatggatgctaacttatgtcaggttattcacatggagctggatcatgaaagaatgtcctaccttctttaccagatgctttgtggtattaaacatctgcattcagctggtataattcatagagatttgaagcctagcaacattgttgtgaaatcagactgcaccctgaagatccttgactttggcctggcccggacagcgtgcactaacttcatgatgaccccttacgtggtgacacggtactaccgggcgcccgaagtcatcctgggtatgggctacaaagagaacgttgatatctggtcagtgggttgcatcatgggagagctggtgaaaggttgtgtgatattccaaggcactgaccatattgatcagtggaataaagttattgagcagctgggaacaccatcagcagagttcatgaagaaacttcagccaactgtgaggaattatgtcgaaaacagaccaaagtatcctggaatcaaatttgaagaactctttccagattggatattcccatcagaatctgagcgagacaaaataaaaacaagtcaagccagagatctgttatcaaaaatgttagtgattgatcctgacaagcggatctctgtagacgaagctctgcgtcacccatacatcactgtttggtatgaccccgccgaagcagaagccccaccacctcaaatttatgatgcccagttggaagaaagagaacatgcaattgaagaatggaaagagctaatttacaaagaagtcatggattgggaagaaagaagcaagaatggtgttgtaaaagatcagccttcagatgcagcagtaagtagcaacgccactccttctcagtcttcatcgatcaatgacatttcatccatgtccactgagcagacgctggcctcagacacagacagcagtcttgatgcctcgacgggaccccttgaaggctgtcgatgataggttagaaatagcaaacctgtcagcattgaaggaactctcacctccgtgggcctgaaatgcttgggagttgatggaaccaaatagaaaaactccatgttctgcatgtaagaaacacaatgccttgccctattcagacctgataggattgcctgcttagatgataaaatgaggcagaatatgtctgaagaaaaaaattgcaagccacacttctagagattttgttcaagatcatttcaggtgagcagttagagtaggtgaatttgtttcaaattgtactagtgacagtttctcatcatctgtaactgttgagatgtatgtgcatgtgaccacaaatgcttgcttggacttgcccatctagcactttggaaatcagtatttaaatgccaaataatcttccaggtagtgctgcttctgaagttatctcttaatcctcttaagtaatttggtgtctgtccagaaaaagtcgatttatgtgtattaattggccatcatgatgttatcatatcttattcccttttatgctatgatttattctatcttttgtatttcagaagacatataattaaatctatttaataaataaaaatatatagctttaaaaaaaaaaaaaaaaaa

SEQ ID NO: 226 - protein, 424 aa, Homo sapiens
MSDSKCDSQFYSVQVADSTFTVLKRYQQLKPIGSGAQGIVCAAFDTVLGINVAVKKLSRPFQNQTHAKRAYRELVLLKCVNHKNIISLLNVFTPQKTLEEFQDVYLVMELMDANLCQVIHMELDHERMSYLLYQMLCGIKHLHSAGIIHRDLKPSNIVVKSDCTLKILDFGLARTACTNFMMTPYVVTRYYRAPEVILGMGYKENVDIWSVGCIMGELVKGCVIFQGTDHIDQWNKVIEQLGTPSAEFMKKLQPTVRNYVENRPKYPGIKFEELFPDWIFPSESERDKIKTSQARDLLSKMLVIDPDKRISVDEALRHPYITVWYDPAEAEAPPPQIYDAQLEEREHAIEEWKELIYKEVMDWEERSKNGVVKDQPSDAAVSSNATPSQSSSINDISSMSTEQTLASDTDSSLDASTGPLEGCR

SEQ ID NO: 227 - DNA, 1947 bp, Homo sapiens
  CDS (50)...(1198): JNK2 variant 2
agggatctgaaacttgcccacccttcgggatattgcaggacgctgcatcatgagcgacagtaaatgtgacagtcagttttatagtgtgcaagtggcagactcaaccttcactgtcctaaaacgttaccagcagctgaaaccaattggctctggggcccaagggattgtttgtgctgcatttgatacagttcttgggataaatgttgcagtcaagaaactaagccgtccttttcagaaccaaactcatgcaaagagagcttatcgtgaacttgtcctcttaaaatgtgtcaatcataaaaatataattagtttgttaaatgtgtttacaccacaaaaaactctagaagaatttcaagatgtgtatttggttatggaattaatggatgctaacttatgtcaggttattcacatggagctggatcatgaaagaatgtcctaccttctttaccagatgctttgtggtattaaacatctgcattcagctggtataattcatagagatttgaagcctagcaacattgttgtgaaatcagactgcaccctgaagatccttgactttggcctggcccggacagcgtgcactaacttcatgatgaccccttacgtggtgacacggtactaccgggcgcccgaagtcatcctgggtatgggctacaaagagaacgttgatatctggtcagtgggttgcatcatgggagagctggtgaaaggttgtgtgatattccaaggcactgaccatattgatcagtggaataaagttattgagcagctgggaacaccatcagcagagttcatgaagaaacttcagccaactgtgaggaattatgtcgaaaacagaccaaagtatcctggaatcaaatttgaagaactctttccagattggatattcccatcagaatctgagcgagacaaaataaaaacaagtcaagccagagatctgttatcaaaaatgttagtgattgatcctgacaagcggatctctgtagacgaagctctgcgtcacccatacatcactgtttggtatgaccccgccgaagcagaagccccaccacctcaaatttatgatgcccagttggaagaaagagaacatgcaattgaagaatggaaagagctaatttacaaagaagtcatggattgggaagaaagaagcaagaatggtgttgtaaaagatcagccttcagcacagatgcagcagtaagtagcaacgccactccttctcagtcttcatcgatcaatgacatttcatccatgtccactgagcagacgctggcctcagacacagacagcagtcttgatgcctcgacgggaccccttgaaggctgtcgatgataggttagaaatagcaaacctgtcagcattgaaggaactctcacctccgtgggcctgaaatgcttgggagttgatggaaccaaatagaaaaactccatgttctgcatgtaagaaacacaatgccttgccctattcagacctgataggattgcctgcttagatgataaaatgaggcagaatatgtctgaagaaaaaaattgcaagccacacttctagagattttgttcaagatcatttcaggtgagcagttagagtaggtgaatttgtttcaaattgtactagtgacagtttctcatcatctgtaactgttgagatgtatgtgcatgtgaccacaaatgcttgcttggacttgcccatctagcactttggaaatcagtatttaaatgccaaataatcttccaggtagtgctgcttctgaagttatctcttaatcctcttaagtaatttggtgtctgtccagaaaaagtcgatttatgtgtattaattggccatcatgatgttatcatatcttattcccttttatgctatgatttattctatcttttgtatttcagaagacatataattaaatctatttaataaataaaaatatatagctttaaaaaaaaaaaaaaaaaa

SEQ ID NO: 228 - protein, 382 aa, Homo sapiens
MSDSKCDSQFYSVQVADSTFTVLKRYQQLKPIGSGAQGIVCAAFDTVLGINVAVKKLSRPFQNQTHAKRAYRELVLLKCVNHKNIISLLNVFTPQKTLEEFQDVYLVMELMDANLCQVIHMELDHERMSYLLYQMLCGIKHLHSAGIIHRDLKPSNIVVKSDCTLKILDFGLARTACTNFMMTPYVVTRYYRAPEVILGMGYKENVDIWSVGCIMGELVKGCVIFQGTDHIDQWNKVIEQLGTPSAEFMKKLQPTVRNYVENRPKYPGIKFEELFPDWIFPSESERDKIKTSQARDLLSKMLVIDPDKRISVDEALRHPYITVWYDPAEAEAPPPQIYDAQLEEREHAIEEWKELIYKEVMDWEERSKNGVVKDQPSAQMQQ

SEQ ID NO: 229 - DNA, 1947 bp, Homo sapiens
  CDS (50)...(1198): JNK2 variant 3
agggatctgaaacttgcccacccttcgggatattgcaggacgctgcatcatgagcgacagtaaatgtgacagtcagttttatagtgtgcaagtggcagactcaaccttcactgtcctaaaacgttaccagcagctgaaaccaattggctctggggcccaagggattgtttgtgctgcatttgatacagttcttgggataaatgttgcagtcaagaaactaagccgtccttttcagaaccaaactcatgcaaagagagcttatcgtgaacttgtcctcttaaaatgtgtcaatcataaaaatataattagtttgttaaatgtgtttacaccacaaaaaactctagaagaatttcaagatgtgtatttggttatggaattaatggatgctaacttatgtcaggttattcacatggagctggatcatgaaagaatgtcctaccttctttaccagatgctttgtggtattaaacatctgcattcagctggtataattcatagagatttgaagcctagcaacattgttgtgaaatcagactgcaccctgaagatccttgactttggcctggcccggacagcgtgcactaacttcatgatgaccccttacgtggtgacacggtactaccgggcgcccgaagtcatcctgggtatgggctacaaagagaacgttgatatctggtcagtcgggtgcatcatggcagaaatggtcctccataaagtcctgttcccgggaagagactatattgatcagtggaataaagttattgagcagctgggaacaccatcagcagagttcatgaagaaacttcagccaactgtgaggaattatgtcgaaaacagaccaaagtatcctggaatcaaatttgaagaactctttccagattggatattcccatcagaatctgagcgagacaaaataaaaacaagtcaagccagagatctgttatcaaaaatgttagtgattgatcctgacaagcggatctctgtagacgaagctctgcgtcacccatacatcactgtttggtatgaccccgccgaagcagaagccccaccacctcaaatttatgatgcccagttggaagaaagagaacatgcaattgaagaatggaaagagctaatttacaaagaagtcatggattgggaagaaagaagcaagaatggtgttgtaaaagatcagccttcagcacagatgcagcagtaagtagcaacgccactccttctcagtcttcatcgatcaatgacatttcatccatgtccactgagcagacgctggcctcagacacagacagcagtcttgatgcctcgacgggaccccttgaaggctgtcgatgataggttagaaatagcaaacctgtcagcattgaaggaactctcacctccgtgggcctgaaatgcttgggagttgatggaaccaaatagaaaaactccatgttctgcatgtaagaaacacaatgccttgccctattcagacctgataggattgcctgcttagatgataaaatgaggcagaatatgtctgaagaaaaaaattgcaagccacacttctagagattttgttcaagatcatttcaggtgagcagttagagtaggtgaatttgtttcaaattgtactagtgacagtttctcatcatctgtaactgttgagatgtatgtgcatgtgaccacaaatgcttgcttggacttgcccatctagcactttggaaatcagtatttaaatgccaaataatcttccaggtagtgctgcttctgaagttatctcttaatcctcttaagtaatttggtgtctgtccagaaaaagtcgatttatgtgtattaattggccatcatgatgttatcatatcttattcccttttatgctatgatttattctatcttttgtatttcagaagacatataattaaatctatttaataaataaaaatatatagctttaaaaaaaaaaaaaaaaaa

SEQ ID NO: 230 - protein, 382 aa, Homo sapiens
MSDSKCDSQFYSVQVADSTFTVLKRYQQLKPIGSGAQGIVCAAFDTVLGINVAVKKLSRPFQNQTHAKRAYRELVLLKCVNHKNIISLLNVFTPQKTLEEFQDVYLVMELMDANLCQVIHMELDHERMSYLLYQMLCGIKHLHSAGIIHRDLKPSNIVVKSDCTLKILDFGLARTACTNFMMTPYVVTRYYRAPEVILGMGYKENVDIWSVGCIMAEMVLHKVLFPGRDYIDQWNKVIEQLGTPSAEFMKKLQPTVRNYVENRPKYPGIKFEELFPDWIFPSESERDKIKTSQARDLLSKMLVIDPDKRISVDEALRHPYITVWYDPAEAEAPPPQIYDAQLEEREHAIEEWKELIYKEVMDWEERSKNGVVKDQPSAQMQQ

SEQ ID NO: 231 - DNA, 1942 bp, Homo sapiens
  CDS (50)...(1324): JNK2 variant 4
agggatctgaaacttgcccacccttcgggatattgcaggacgctgcatcatgagcgacagtaaatgtgacagtcagttttatagtgtgcaagtggcagactcaaccttcactgtcctaaaacgttaccagcagctgaaaccaattggctctggggcccaagggattgtttgtgctgcatttgatacagttcttgggataaatgttgcagtcaagaaactaagccgtccttttcagaaccaaactcatgcaaagagagcttatcgtgaacttgtcctcttaaaatgtgtcaatcataaaaatataattagtttgttaaatgtgtttacaccacaaaaaactctagaagaatttcaagatgtgtatttggttatggaattaatggatgctaacttatgtcaggttattcacatggagctggatcatgaaagaatgtcctaccttctttaccagatgctttgtggtattaaacatctgcattcagctggtataattcatagagatttgaagcctagcaacattgttgtgaaatcagactgcaccctgaagatccttgactttggcctggcccggacagcgtgcactaacttcatgatgaccccttacgtggtgacacggtactaccgggcgcccgaagtcatcctgggtatgggctacaaagagaacgttgatatctggtcagtcgggtgcatcatggcagaaatggtcctccataaagtcctgttcccgggaagagactatattgatcagtggaataaagttattgagcagctgggaacaccatcagcagagttcatgaagaaacttcagccaactgtgaggaattatgtcgaaaacagaccaaagtatcctggaatcaaatttgaagaactctttccagattggatattcccatcagaatctgagcgagacaaaataaaaacaagtcaagccagagatctgttatcaaaaatgttagtgattgatcctgacaagcggatctctgtagacgaagctctgcgtcacccatacatcactgtttggtatgaccccgccgaagcagaagccccaccacctcaaatttatgatgcccagttggaagaaagagaacatgcaattgaagaatggaaagagctaatttacaaagaagtcatggattgggaagaaagaagcaagaatggtgttgtaaaagatcagccttcagatgcagcagtaagtagcaacgccactccttctcagtcttcatcgatcaatgacatttcatccatgtccactgagcagacgctggcctcagacacagacagcagtcttgatgcctcgacgggaccccttgaaggctgtcgatgataggttagaaatagcaaacctgtcagcattgaaggaactctcacctccgtgggcctgaaatgcttgggagttgatggaaccaaatagaaaaactccatgttctgcatgtaagaaacacaatgccttgccctattcagacctgataggattgcctgcttagatgataaaatgaggcagaatatgtctgaagaaaaaaattgcaagccacacttctagagattttgttcaagatcatttcaggtgagcagttagagtaggtgaatttgtttcaaattgtactagtgacagtttctcatcatctgtaactgttgagatgtatgtgcatgtgaccacaaatgcttgcttggacttgcccatctagcactttggaaatcagtatttaaatgccaaataatcttccaggtagtgctgcttctgaagttatctcttaatcctcttaagtaatttggtgtctgtccagaaaaagtcgatttatgtgtattaattggccatcatgatgttatcatatcttattcccttttatgctatgatttattctatcttttgtatttcagaagacatataattaaatctatttaataaataaaaatatatagctttaaaaaaaaaaaaaaaaaa

SEQ ID NO: 232 - protein, 424 aa, Homo sapiens
MSDSKCDSQFYSVQVADSTFTVLKRYQQLKPIGSGAQGIVCAAFDTVLGINVAVKKLSRPFQNQTHAKRAYRELVLLKCVNHKNIISLLNVFTPQKTLEEFQDVYLVMELMDANLCQVIHMELDHERMSYLLYQMLCGIKHLHSAGIIHRDLKPSNIVVKSDCTLKILDFGLARTACTNFMMTPYVVTRYYRAPEVILGMGYKENVDIWSVGCIMAEMVLHKVLFPGRDYIDQWNKVIEQLGTPSAEFMKKLQPTVRNYVENRPKYPGIKFEELFPDWIFPSESERDKIKTSQARDLLSKMLVIDPDKRISVDEALRHPYITVWYDPAEAEAPPPQIYDAQLEEREHAIEEWKELIYKEVMDWEERSKNGVVKDQPSDAAVSSNATPSQSSSINDISSMSTEQTLASDTDSSLDASTGPLEGCR

SEQ ID NO: 233 - DNA, 2685 bp, Homo sapiens
  CDS (197)...(1252): Protein Kinase A variant 1
tcgggctgaggttcccgggcgggcgggcgcggagagacgcgggaagcaggggctgggcgggggtcgcggcgccgcagctagcgcagccagcccgagggccgccgccgccgccgcccagcgcgctccggggccgccggccgcagccagcacccgccgcgccgcagctccgggaccggccccggccgccgccgccgcgatgggcaacgccgccgccgccaagaagggcagcgagcaggagagcgtgaaagaattcttagccaaagccaaagaagattttcttaaaaaatgggaaagtcccgctcagaacacagcccacttggatcagtttgaacgaatcaagaccctcggcacgggctccttcgggcgggtgatgctggtgaaacacaaggagaccgggaaccactatgccatgaagatcctcgacaaacagaaggtggtgaaactgaaacagatcgaacacaccctgaatgaaaagcgcatcctgcaagctgtcaactttccgttcctcgtcaaactcgagttctccttcaaggacaactcaaacttatacatggtcatggagtacgtgcccggcggggagatgttctcacacctacggcggatcggaaggttcagtgagccccatgcccgtttctacgcggcccagatcgtcctgacctttgagtatctgcactcgctggatctcatctacagggacctgaagccggagaatctgctcattgaccagcagggctacattcaggtgacagacttcggtttcgccaagcgcgtgaagggccgcacttggaccttgtgcggcacccctgagtacctggcccctgagattatcctgagcaaaggctacaacaaggccgtggactggtgggccctgggggttcttatctatgaaatggccgctggctacccgcccttcttcgcagaccagcccatccagatctatgagaagatcgtctctgggaaggtgcgcttcccttcccacttcagctctgacttgaaggacctgctgcggaacctcctgcaggtagatctcaccaagcgctttgggaacctcaagaatggggtcaacgatatcaagaaccacaagtggtttgccacaactgactggattgccatctaccagaggaaggtggaagctcccttcataccaaagtttaaaggccctggggatacgagtaactttgacgactatgaggaagaagaaatccgggtctccatcaatgagaagtgtggcaaggagttttctgagttttaggggcatgcctgtgcccccatgggttttcttttttcttttttcttttttttggtcgggggggtgggagggttggattgaacagccagagggccccagagttccttgcatctaatttcacccccaccccaccctccagggttagggggagcaggaagcccagataatcagagggacagaaacaccagctgctccccctcatccccttcaccctcctgccccctctcccacttttcccttcctctttccccacagccccccagcccctcagccctcccagcccacttctgcctgttttaaacgagtttctcaactccagtcagaccaggtcttgctggtgtatccagggacagggtatggaaagaggggctcacgcttaactccagcccccacccacacccccatcccacccaaccacaggccccacttgctaagggcaaatgaacgaagcgccaaccttcctttcggagtaatcctgcctgggaaggagagatttttagtgacatgttcagtgggttgcttgctagaatttttttaaaaaaacaacaatttaaaatcttatttaagttccaccagtgcctccctccctccttcctctactcccacccctcccatgtccccccattcctcaaatccattttaaagagaagcagactgactttggaaagggaggcgctggggtttgaacctccccgctgctaatctcccctgggcccctccccggggaatcctctctgccaatcctgcgagggtctaggcccctttaggaagcctccgctctctttttccccaacagacctgtcttcacccttgggctttgaaagccagacaaagcagctgcccctctccctgccaaagaggagtcatcccccaaaaagacagagggggagccccaagcccaagtctttcctcccagcagcgtttccccccaactccttaattttattctccgctagattttaacgtccagccttccctcagctgagtggggagggcatccctgcaaaagggaacagaagaggccaagtccccccaagccacggcccggggttcaaggctagagctgctggggaggggctgcctgttttactcacccaccagcttccgcctcccccatcctgggcgcccctcctccagcttagctgtcagctgtccatcacctctcccccactttctcatttgtgcttttttctctcgtaatagaaaagtggggagccgctggggagccaccccattcatccccgtatttccccctctcataacttctccccatcccaggaggagttctcaggcctggggtggggccccgggtgggtgcgggggcgattcaacctgtgtgctgcgaaggacgagacttcctcttgaacagtgtgctgttgtaaacatatttgaaaactattaccaataaagttttgtttaaaaaaaaaaaaaaaaaa

SEQ ID NO: 234 - protein, 351 aa, Homo sapiens
MGNAAAAKKGSEQESVKEFLAKAKEDFLKKWESPAQNTAHLDQFERIKTLGTGSFGRVMLVKHKETGNHYAMKILDKQKVVKLKQIEHTLNEKRILQAVNFPFLVKLEFSFKDNSNLYMVMEYVPGGEMFSHLRRIGRFSEPHARFYAAQIVLTFEYLHSLDLIYRDLKPENLLIDQQGYIQVTDFGFAKRVKGRTWTLCGTPEYLAPEIILSKGYNKAVDWWALGVLIYEMAAGYPPFFADQPIQIYEKIVSGKVRFPSHFSSDLKDLLRNLLQVDLTKRFGNLKNGVNDIKNHKWFATTDWIAIYQRKVEAPFIPKFKGPGDTSNFDDYEEEEIRVSINEKCGKEFSEF

SEQ ID NO: 235 - DNA, 2945 bp, Homo sapiens
  CDS (48)...(1103): Protein Kinase A variant 2
ccagccccccttcccttccctgaccccttcttgccatcgccccagacatggggaacgcggcgaccgccaagaaaggcagcgaggtggagagcgtgaaagagtttctagccaaagccaaagaagactttttgaaaaaatgggagaatccaactcagaataatgccggacttgaagattttgaaaggaaaaaaacccttggaacaggttcatttggaagagtcatgttggtaaaacacaaagccactgaacagtattatgccatgaagatcttagataagcagaaggttgttaaactgaagcaaatagagcatactttgaatgagaaaagaatattacaggcagtgaattttcctttccttgttcgactggagtatgcttttaaggataattctaatttatacatggttatggaatatgtccctgggggtgaaatgttttcacatctaagaagaattggaaggttcagtgagccccatgcacggttctatgcagctcagatagtgctaacattcgagtacctccattcactagacctcatctacagagatctaaaacctgaaaatctcttaattgaccatcaaggctatatccaggtcacagactttgggtttgccaaaagagttaaaggcagaacttggacattatgtggaactccagagtatttggctccagaaataattctcagcaagggctacaataaggcagtggattggtgggcattaggagtgctaatctatgaaatggcagctggctatcccccattctttgcagaccaaccaattcagatttatgaaaagattgtttctggaaaggtccgattcccatcccacttcagttcagatctcaaggaccttctacggaacctgctgcaggtggatttgaccaagagatttggaaatctaaagaatggtgtcagtgatataaaaactcacaagtggtttgccacgacagattggattgctatttaccagaggaaggttgaagctccattcataccaaagtttagaggctctggagataccagcaactttgatgactatgaagaagaagatatccgtgtctctataacagaaaaatgtgcaaaagaatttggtgaattttaaagaggaacaagatgacatctgagctcacactcagtgtttgcactctgttgagagataaggtagagctgagaccgtccttgttgaagcagttacctagttccttcattccaacgactgagtgaggtctttattgccatcatccgtgtgcgcactctgcatccacctatgtaacaaggcaccgctaagcaagcattgtctgtgccataacacagtactagaccactttcttacttctctttgggttgtctttctcctctcctacatccatttcttccttttcaatttcattggttttctctaaacagtgctccattttattttgttggtgtttcagatgggcagtgttatggctacgtgatatttgaagggaaggataagtgttgctttcagtagttattgccaatattgttgttggtcaatggcttgaagataaactttctaataattattatttctttgagtagctcagacttggttttgccaaaactcttggtaatttttgaagatagactgtcttatcaccaaggaaatttatacaaattaagactaactttcttggaattcactattctggcaataaattttggtagactaatacagtacagctagacccagaaatttggaaggctgtagatcagaggttctagttccctttccctccttttatatcctcctctccttgagtaatgaagtgaccagcctgtgtagtgtgacaaacgtgtctcattcagcaggaaaaactaatgatatggatcatcacccagattctctcacttggtaccagcatttctgtaggtattagagaagagttctaagttttctaaaccttaactgttccttaaggattttagccagtattttaatagaacatgattaatgaaagtgacaaattttaaattttctctaatagtcctcatcataaactttttaaaggaaaataagcaaactaaaaagaacattggtttagataaatacttatactttgcaaagtcaaaaatggcttgatttttggaaacaatatagaggtattcatatttaaatgagggtttacatttgttttgttttgtaaccgttaaaaagaagttgtttccagctaattattgtggtgtactatatttgtgagcctagggtaggggcactgctgcaacttctgctttcatcccatgcctcatcaatgaggaaagggaacaaagtgtataaaacctgccacaattgtattttaattttgaggtatgatattttcagatatttcataatttctaacctctgttctctcagtaaacagaatgtctgatcgatcatgcagatacaatgttggtatttgagaggttagtttttttcctacacttttttttgccaactgacttaacaacattgctgtcaggtggaaatttcaagcacttttgcacatttagttcagtgtttgttgagaatccatggcttaacccacttgttttgctatttttttctttgcttttaattttccccatctgattttatctctgcgtttcagtgacctaccttaaaacaacacacgagaagagttaaactgggttcattttaatgatcaatttacctgcatataaaatttatttttaatcaagctgatcttaatgtatataatcattctatttgctttattatcggtgcaggtaggtcattaacaccacttcttttcatctgtaccacaccctggtgaaacctttgaagacataaaaaaaacctgtctgagatgttctttctaccaatctatatgtctttcggttatcaagtgtttctgcatggtaatgtcatgtaaatgctgatattgatttcactggtccatctatatttaaaacgtgc

SEQ ID NO: 236 - protein, 351 aa, Homo sapiens
MGNAATAKKGSEVESVKEFLAKAKEDFLKKWENPTQNNAGLEDFERKKTLGTGSFGRVMLVKHKATEQYYAMKILDKQKVVKLKQIEHTLNEKRILQAVNFPFLVRLEYAFKDNSNLYMVMEYVPGGEMFSHLRRIGRFSEPHARFYAAQIVLTFEYLHSLDLIYRDLKPENLLIDHQGYIQVTDFGFAKRVKGRTWTLCGTPEYLAPEIILSKGYNKAVDWWALGVLIYEMAAGYPPFFADQPIQIYEKIVSGKVRFPSHFSSDLKDLLRNLLQVDLTKRFGNLKNGVSDIKTHKWFATTDWIAIYQRKVEAPFIPKFRGSGDTSNFDDYEEEDIRVSITEKCAKEFGEF

SEQ ID NO: 237 - DNA, 1560 bp, Homo sapiens
  CDS (1)...(1056): Protein Kinase A variant 3
atgggcaacgcccccgccaagaaggacaccgagcaggaggagagcgtgaacgagttcctagccaaagccagaggagatttcctctacagatggggaaaccccgctcaaaacaccgccagctcggatcagttcgaacggctcaggacgctgggcatgggctccttcgggcgggtgatgctggtgaggcaccaggagaccggcggccactacgccatgaagatcctcaacaagcagaaggtggtgaagatgaagcaggtcgagcacatactgaacgagaagcgcatcctgcaggcgatcgactttccgttcctcgtcaagctccagttctcctttaaggacaactcctacctgtacctggtgatggagtacgtgccgggtggggagatgttctcccgcctacagcgcgtcggaaggtttagcgagccccatgcctgtttctatgccgcccaggtcgtcctggccgtccagtacctacactcgctcgacctcatccaccgcgacctgaagcccgagaatctcctcatcgaccagcagggctacctgcaggtgacggacttcggtttcgccaagcgcgtgaagggccgcacttggaccttgtgcgggaccccagagtacctggcccccgagatcatcctgagcaaaggctacaacaaggccgtggactggtgggccctaggggtgctcatctatgagatggccgtgggcttcccacccttctacgccgaccagcccatccagatctacgagaagatcgtctctgggagggtgcggtttccctccaaactcagctctgacctcaagcatctgctgcggagcctgctgcaggtggacctcaccaagcgcttcggaaacctcaggaacggggttggcgacatcaagaaccacaagtggttcgccacaaccagctggatcgccatctatgagaagaaggtggaagctcccttcatcccgaagtacacaggccctggggatgccagtaactttgacgactacgaggaggaagagctccggatctccatcaatgagaagtgtgccaaggagttttctgagttttaggggtgtgcttgtgcccctgtgggttttctttcctttttgtttttggtggtttgggggatgggagggttggattgaacagccagagggccccagagttccttgtatctaatttcatcctcaccccaccctccagggttgggggagcaggaagcccagatatttggaggaacagaaacaccagctgctccctcaccccccgccccatgccttcctggtccctctgtgcttctctctttctcctcccacagggtcccccttgccccagcccccttctgcctgttttaaacgagtttctcagctctattcaggccaggtcttgctgttgtatcaagggacacggtgtggaaagaggggctcaaacttaactccagccctgaacaggcaccacttactaagagaggatgaatgaaaagcacacctaccctttggagtaatcctgcctgggaaggagagaggtttagtgccatgttcagtgggctgtttgctagaataaaaaattaaaac

SEQ ID NO: 238 - protein, 351 aa, Homo sapiens
MGNAPAKKDTEQEESVNEFLAKARGDFLYRWGNPAQNTASSDQFERLRTLGMGSFGRVMLVRHQETGGHYAMKILNKQKVVKMKQVEHILNEKRILQAIDFPFLVKLQFSFKDNSYLYLVMEYVPGGEMFSRLQRVGRFSEPHACFYAAQVVLAVQYLHSLDLIHRDLKPENLLIDQQGYLQVTDFGFAKRVKGRTWTLCGTPEYLAPEIILSKGYNKAVDWWALGVLIYEMAVGFPPFYADQPIQIYEKIVSGRVRFPSKLSSDLKHLLRSLLQVDLTKRFGNLRNGVGDIKNHKWFATTSWIAIYEKKVEAPFIPKYTGPGDASNFDDYEEEELRISINEKCAKEFSEF

SEQ ID NO: 239 - DNA, 1698 bp, Homo sapiens
  CDS (61)...(1056): Protein Kinase A variant 4
gcggggcctgccccaagagagtttcctaaagcgaggaaaccaagccgggcgcctcttgcaatggagacggtcatttcttcagatagctccccagctgtggaaaatgagcatcctcaagagaccccagaatccaacaatagcgtgtatacttccttcatgaagtctcatcgctgctatgacctgattcccacaagctccaaattggttgtatttgatacgtccctgcaggtgaagaaagctttttttgctttggtgactaacggtgtacgagctgcccctttatgggatagtaagaagcaaagttttgtgggcatgctgaccatcactgatttcatcaatatcctgcaccgctactataaatcagccttggtacagatctatgagctagaagaacacaagatagaaacttggagagaggtgtatctccaggactcctttaaaccgcttgtctgcatttctcctaatgccagcttgtttgatgctgtctcttcattaattcggaacaagatccacaggctgccagttattgacccagaatcaggcaatactttgtacatcctcacccacaagcgcattctgaagttcctcaaattgtttatcactgagttccccaagccagagttcatgtccaagtctctggaagagctacagattggcacctatgccaatattgctatggttcgcactaccacccccgtctatgtggctctggggatttttgtacagcatcgagtctcagccctgccagtggtggatgagaaggggcgtgtggtggacatctactccaagtttgatgttatcaatctggcagcagaaaagacctacaacaacctagatgtatctgtgactaaagccttgcaacatcgatcacattactttgagggtgttctcaagtgctacctgcatgagactctggagaccatcatcaacaggctagtggaagcagaggttcaccgacttgtagtggtggatgaaaatgatgtggtcaagggaattgtatcactgtctgacatcctgcaggccctggtgctcacaggtggagagaagaagccctgagctgggggaaggggtcatgcagcaccaggggatatgcccaactcactgcctgctggaagctctgtgggaatcagatgaaacttgagggaattgtgactctgttccctgttcagggtcccctgcccttctatctgggagctagggaaggtatgggggaggaaagagaatggatttatagctacccttaccctcacacatacacttgaaaaaactttcagcctagccagttctagcccctgtcctcttagatatatccccctttctgggtgaactataggctctgtgcctctcagacaaattctgatctctaagagatccccagacctcacttgcctctgcctccatcttggccctgattcaaccctaagataatagcacaacaaaattcttcataaagatatttttattcacctgttccgtgctatatggaggaggccaagtccatttagtgacatttcttcccataatgtgagtggggaggattgtggggaggaggggctttgggttcctgtgtttgtgcatatgaagggagatgggggttaggtggaggaggagagcagcgtggttagctaaggttattgctttttgtggcaaatctaattaaatgacaggaatctcttcacgataaaaaaaaaaaaaaaa

SEQ ID NO: 240 - protein, 331 aa, Homo sapiens
METVISSDSSPAVENEHPQETPESNNSVYTSFMKSHRCYDLIPTSSKLVVFDTSLQVKKAFFALVTNGVRAAPLWDSKKQSFVGMLTITDFINILHRYYKSALVQIYELEEHKIETWREVYLQDSFKPLVCISPNASLFDAVSSLIRNKIHRLPVIDPESGNTLYILTHKRILKFLKLFITEFPKPEFMSKSLEELQIGTYANIAMVRTTTPVYVALGIFVQHRVSALPVVDEKGRVVDIYSKFDVINLAAEKTYNNLDVSVTKALQHRSHYFEGVLKCYLHETLETIINRLVEAEVHRLVVVDENDVVKGIVSLSDILQALVLTGGEKKP

SEQ ID NO: 241 - DNA, 3600 bp, Homo sapiens
  CDS (129)...(1274): Protein Kinase A variant 5
ggtggagctgtcgcctagccgctatcgcagagtggagcggggctgggagcaaagcgctgagggagctcggtacgccgccgcctcgcacccgcagcctcgcgcccgccgccgcccgtccccagagaaccatggagtctggcagtaccgccgccagtgaggaggcacgcagccttcgagaatgtgagctctacgtccagaagcataacattcaagcgctgctcaaagattctattgtgcagttgtgcactgctcgacctgagagacccatggcattcctcagggaatactttgagaggttggagaaggaggaggcaaaacagattcagaatctgcagaaagcaggcactcgtacagactcaagggaggatgagatttctcctcctccacccaacccagtggttaaaggtaggaggcgacgaggtgctatcagcgctgaggtctacacggaggaagatgcggcatcctatgttagaaaggttataccaaaagattacaagacaatggccgctttagccaaagccattgaaaagaatgtgctgttttcacatcttgatgataatgagagaagtgatatttttgatgccatgttttcggtctcctttatcgcaggagagactgtgattcagcaaggtgatgaaggggataacttctatgtgattgatcaaggagagacggatgtctatgttaacaatgaatgggcaaccagtgttggggaaggagggagctttggagaacttgctttgatttatggaacaccgagagcagccactgtcaaagcaaagacaaatgtgaaattgtggggcatcgaccgagacagctatagaagaatcctcatgggaagcacactgagaaagcggaagatgtatgaggaattccttagtaaagtctctattttagagtctctggacaagtgggaacgtcttacggtagctgatgcattggaaccagtgcagtttgaagatgggcagaagattgtggtgcagggagaaccaggggatgagttcttcattattttagaggggtcagctgctgtgctacaacgtcggtcagaaaatgaagagtttgttgaagtgggaagattggggccttctgattattttggtgaaattgcactactgatgaatcgtcctcgtgctgccacagttgttgctcgtggccccttgaagtgcgttaagctggaccgacctagatttgaacgtgttcttggcccatgctcagacatcctcaaacgaaacatccagcagtacaacagttttgtgtcactgtctgtctgaaatctgcctcctgtgcctcccttttctcctctccccaatccatgcttcactcatgcaaactgctttattttccctacttgcagcgccaagtggccactggcatcgcagcttcctgtctgtttatatattgaaagttgcttttattgcaccattttcaatttggagcattaactaaatgctcatacacagttaaataaatagaaagagttctatggagactttgctgttactgcttctctttgtgcagtgttagtattcaccctgggcagtgagtgccatgctttttggtgagggcagatcccagcacctattgaattaccatagagtaatgatgtaacagtgcaagattttttttttaagtgacataattgtccagttataagcgtatttagactgtggccatatatgctgtatttctttgtagaataaatggtttctcattaaactctaaagattagggaaaatggatatagaaaatcttagtatagtagaaagacatctgcctgtaattaaactagtttaagggtggaaaaatgcccatttttgctaattatcaatgggatatgattggttcagtttttttttttccagagttgttgtttgccaagctaatctgcctggttttatttatatcttgttattaatgtttcttctccaattctgaaatacttttgagtatggctatctatacctgccttttaagtttgaaactaactcatagattgcaaatattggttagtatttaactacatctgcctcggctcacaaattccgattagacctttatccagctagtgccaaataattgatcagatgctgaattgagaataagaatttgaggtctacattcttggttgttaatttagagcgtttggttaaagtatgtccttcagctgactccagtataatctcctctgctcattaaactgattccaggagattggatttgctgtgactagatacagatggagcaaatgtcctaacagagaaatagaggtgatgctgctaaagggagaaatgccaggcggacaaagttcagtgtcgggaattttccccgtgacattcactggggcatgagattttggaagaagttttttactttggtttagtctttttttccttcctttttattcagctagaatttctggtgggttgatggtagggtataatgtgtctgtgttgcttcaaattggtctgaaaggctatcctgcggaaagtcctgctttcctatctagcatttatttctctggcaaacttttctttcttttcttttttaaagtaaacttgtgtattgagtcttaactgtatttcagtattttccagccttatgtgttacattattccaatgatacccaacagtttatttttattatttttttaaacaaaatttcacagttctgtaatgtaggcacttttattttcattgtgatttatatataaggtaatgtagggttatatttgggagtgactgcaagcatttttccatctgtgtgcaactaactgactctgttattgatcccttctcctgccctttcccaggtaatttaaattggtcatggtagatttttttcatagatttgaaaaacttttaggttgttaccaagtatgaagtataaatctggggaagaggttttatttacattttagggtgggtaagaaagccaccttgttacaaattttttaatttccaaaataatctatattaaatgagggtttctgatctgtactttgtgtttagctacctttttatatttaaaaaattaaaaatgaaaattacgttcttacaagcttaaagcttgatttgatctttgtttaaatgccaaaatgtacttaaatgagttacttagaatgccataaaattgcagtttcatgtatgtatataatcatgctcatgtatatttagttacgtataatgctttctgagtgagttttactcttaaatcatttggttaaatcatttggcttgctgtttactcccttctgtagtttttaattaaaaactttaaagataagtctacattaaacaatgatcacatctaaagctttatctttgtgtaatctaagtatatgtgagaaatcagaattggcataatttgtcttagttgatattcaaggctttaaaagtcattattcctgggcttggtaagtgaatttatgagatttactgctctagaaagtatagatggcgaaaggaccgttttgtattgcttcctgattaccagtctgattataccatgtgtgctaatatactttttttgttatagattgtcttaatggtaggtcaagtaataaaaagagatgaaataatttaaaaaaaaaaaaaaaa

SEQ ID NO: 242 - protein, 381 aa, Homo sapiens
MESGSTAASEEARSLRECELYVQKHNIQALLKDSIVQLCTARPERPMAFLREYFERLEKEEAKQIQNLQKAGTRTDSREDEISPPPPNPVVKGRRRRGAISAEVYTEEDAASYVRKVIPKDYKTMAALAKAIEKNVLFSHLDDNERSDIFDAMFSVSFIAGETVIQQGDEGDNFYVIDQGETDVYVNNEWATSVGEGGSFGELALIYGTPRAATVKAKTNVKLWGIDRDSYRRILMGSTLRKRKMYEEFLSKVSILESLDKWERLTVADALEPVQFEDGQKIVVQGEPGDEFFIILEGSAAVLQRRSENEEFVEVGRLGPSDYFGEIALLMNRPRAATVVARGPLKCVKLDRPRFERVLGPCSDILKRNIQQYNSFVSLSV

What is claimed is:

1. A method of assessing the effect of a candidate compound on the activity of a nuclear receptor comprising:
obtaining a cell expressing one or more nuclear receptors and one or more helper proteins, wherein at least one of said nuclear receptor and said helper protein is expressed from a nucleic acid which has been introduced into said cell;
contacting said cell with said candidate compound; and
determining whether said candidate compound influences the activity of said nuclear hormone receptor.

2. The method of claim 1 wherein both said one or more nuclear receptor and said one or more helper protein are expressed from a nucleic acid which has been introduced into said cell.

3. The method of claim 1, wherein said one or more nuclear receptor and said one or more helper protein are expressed from the same nucleic acid which has been introduced into said cell.

4. The method of claim 1, wherein said one or more nuclear receptor is expressed from a first nucleic acid which has been introduced into said cell and said helper protein is expressed from a second nucleic acid which has been introduced into said cell.

5. The method of claim 1, wherein said determining step comprises comparing the activity of said nuclear hormone receptor in a first cell which expresses said nuclear receptor and said helper protein and which has been contacted with said candidate compound to the activity of said nuclear receptor in a second cell which expresses said nuclear receptor and said helper protein and which has not been contacted with said candidate compound, wherein said candidate compound is determined to influence the activity of said nuclear receptor if said activity of said nuclear receptor in said first cell is significantly different from the activity of said nuclear receptor in said second cell.

6. The method of claim 1, wherein said one or more nuclear receptors is encoded by a nucleic acid selected from the group consisting of SEQ ID NOs.: 1, 3, 5, 7, 9, 11, 13, 15, 17, 19, 21, 23, 25, 27, 29, 31, 33, 35, 37, 39, 41, 43, 45, 47, 49, 51, 53, 55, 57, 59, 61, 63, 65, 67, 69, 71, 73, 75, 77, 79, 81, 83, 85, 87, 89, 91, 93, 95, 97, 99, 101, 103, 105, 107, 109, 111, 113, 115, 117, 119, 121, 123, 125, 127, 129, 131, 133, 135, 137, 139, 141, and 143 and said one or more helper proteins is encoded by a nucleic acid selected from the group consisting of 145, 147, 149, 151, 153, 155, 157, 159, 161, 163, 165, 167, 169, 171, 173, 175, 177, 179, 181, 183, 185, 187, 189, 191, 193, 195, 197, 199, 201, 203, 205, 207, 209, 211, 213, 215, 217, 219, 221, 223, 225, 227, 229, 231, 233, 235, 237, 239, and 241.

7. The method of claim 1 wherein said one or more nuclear receptors is encoded by a nucleic acid comprising a nucleic acid having at least 70% nucleotide sequence identity to a nucleotide sequence selected from the group consisting of SEQ ID NOS.: 1, 3, 5, 7, 9, 11, 13, 15, 17, 19, 21, 23, 25, 27, 29, 31, 33, 35, 37, 39, 41, 43, 45, 47, 49, 51, 53, 55, 57, 59, 61, 63, 65, 67, 69, 71, 73, 75, 77, 79, 81, 83, 85, 87, 89, 91, 93, 95, 97, 99, 101, 103, 105, 107, 109, 111, 113, 115, 117, 119, 121, 123, 125, 127, 129, 131, 133, 135, 137, 139, 141, and 143 and said one or more helper proteins is encoded by a nucleic acid comprising a nucleic acid having at least 70% nucleotide sequence identity to a nucleotide sequence selected from the group consisting of SEQ ID NOS.:145, 147, 149, 151, 153, 155, 157, 159, 161, 163, 165, 167, 169, 171, 173, 175, 177, 179, 181, 183, 185, 187, 189, 191, 193, 195, 197, 199, 201, 203, 205, 207, 209, 211, 213, 215, 217, 219, 221, 223, 225, 227, 229, 231, 233, 235, 237, 239, and 241.

8. The method of claim 1, wherein said one or more nuclear receptors comprises an amino acid sequence selected from the group consisting of SEQ ID NOs: 2, 4, 6, 8, 10, 12, 14, 16, 18, 20, 22, 24, 26, 28, 30, 32, 34, 36, 38, 40, 42, 44, 46, 48, 50, 52, 54, 56, 58, 60, 62, 64, 66, 68, 70, 72, 74, 76, 78, 80, 82, 84, 86, 88, 90, 92, 94, 96, 98, 100, 102, 104, 106, 108, 110, 112, 114, 116, 118, 120, 122, 124, 126, 128, 130, 132, 134, 136, 138, 140, 142, and 144 and wherein said one or more helper proteins comprises an amino acid sequence selected from the group consisting of SEQ ID NOs: 146, 148, 150, 152, 154, 156, 158, 160, 162, 164, 166, 168, 170, 172, 174, 176, 178, 180, 182, 184, 186, 188, 190, 192, 194, 196, 198, 200, 202, 204, 206, 208, 210, 212, 214, 216, 218, 220, 222, 224, 226, 228, 230, 232, 234, 236, 238, 240, and 242.

9. The method of claim 1, wherein said one or more nuclear receptors comprises an amino acid sequence having at least 70% amino acid identify to an amino acid sequence selected from the group consisting of SEQ ID NOs: 2, 4, 6, 8, 10, 12, 14, 16, 18, 20, 22, 24, 26, 28, 30, 32, 34, 36, 38, 40, 42, 44, 46, 48, 50, 52, 54, 56, 58, 60, 62, 64, 66, 68, 70, 72, 74, 76, 78, 80, 82, 84, 86, 88, 90, 92, 94, 96, 98, 100, 102, 104, 106, 108, 110, 112, 114, 116, 118, 120, 122, 124, 126, 128, 130, 132, 134, 136, 138, 140, 142, and 144 and wherein said one or more helper proteins comprises an amino acid sequence having at least 70% amino acid identify to an amino acid sequence selected from the group consisting of SEQ ID NOs: 146, 148, 150, 152, 154, 156, 158, 160, 162, 164, 166, 168, 170, 172, 174, 176, 178, 180, 182, 184, 186, 188, 190, 192, 194, 196, 198, 200, 202, 204, 206, 208, 210, 212, 214, 216, 218, 220, 222, 224, 226, 228, 230, 232, 234, 236, 238, 240, and 242.

10. The method of claim 1 wherein the combination of said nucleic acid sequence encoding said one or more nuclear receptors and said one or more helper proteins are selected from the group consisting of:
SEQ ID NO: 5 and SEQ ID NOs: 161 or 213;
SEQ ID NO: 9 and SEQ ID NOs: 145, 147, 161, or 213;
SEQ ID NOs: 21, 23, 25, or 27 and SEQ ID NOs: 145, 147, or 213;
SEQ ID NO: 49 and SEQ ID NOs: 145, 147, 161, or 213;
SEQ ID NO: 45 and SEQ ID NOs: 145 or 213;
SEQ ID NO: 51 and SEQ ID NOs: 145 or 147;
SEQ ID NOs: 53, 55, or 57 and SEQ ID NOs: 145 or 147;
SEQ ID NO: 69 and SEQ ID NOs: 161 or 213;
SEQ ID NO: 93 and SEQ ID NOs: 145, 147, 161, or 213;
SEQ ID NO: 107 and SEQ IDNO: 161;
SEQ ID NO: 103 and SEQ ID NOs: 145, 147, or 161;
SEQ ID NO: 101 and SEQ ID NOs: 145 or 147;
SEQ ID NO: 143 and SEQ ID NOs: 145, 147 or 161;
SEQ ID NO: 29 and SEQ ID NO: 213;
SEQ ID NO: 43 and SEQ ID NO: 161;
SEQ ID NO: 61 and SEQ ID NOs: 145, 147, 161 or 213;
SEQ ID NO: 75 and SEQ ID NOs: 145 or 147;
SEQ ID NO: 79 and SEQ ID NO: 161;
SEQ ID NO: 87 and SEQ ID NO: 145, 147, or 161;
SEQ ID NO: 89 and SEQ ID NOs: 145, 147 or 161;
SEQ ID NO: 99 and SEQ ID NO:161;
SEQ ID NOs: 123, 125, or 127 and SEQ ID NOs: 145, 147, 161, or 213; and
SEQ ID NO: 135 and SEQ ID NOs: 145, 147 or 213.

11. The method of claim 6 wherein the combination of the amino acid sequence of said one or more nuclear receptors and said one or more helper proteins are selected from the group consisting of:
SEQ ID NO: 6 and SEQ ID NOs: 162 or 214;
SEQ ID NO: 10 and SEQ ID NOs: 146, 148, 162, or 214;
SEQ ID NOs: 22, 24, 26 or 28 and SEQ ID NOs: 146, 148, or 214;
SEQ ID NO: 50 and SEQ ID NOs: 146, 148, 162, or 214;
SEQ ID NO: 46 and SEQ ID NOs: 146, 148 or 214;
SEQ ID NO: 52 and SEQ ID NOs: 146 or 148;
SEQ ID NOs: 54, 56, or 58 and SEQ ID NOs: 146 or 148;
SEQ ID NO: 70 and SEQ ID NOs: 162 or 214;
SEQ ID NO: 94 and SEQ ID NOs: 146, 148, 162, or 214;
SEQ ID NO: 108 and SEQ ID NO: 162;
SEQ ID NO: 104 and SEQ ID NOs: 146, 148, or 162;
SEQ ID NO: 102 and SEQ ID NOs: 146 or 148;
SEQ ID NO: 144 and SEQ ID NOs: 146, 148, or 162;
SEQ ID NO: 30 and SEQ ID NO: 214;
SEQ ID NO: 44 and SEQ ID NO: 162;
SEQ ID NO: 62 and SEQ ID NOs: 146, 148, 162, or 214;
SEQ ID NO: 76 and SEQ ID NOs: 146 or 148;
SEQ ID NO: 80 and SEQ ID NO: 162;
SEQ ID NO: 89 and SEQ ID NO: 146, 148, or 162;
SEQ ID NO: 90 and SEQ ID NOs: 146, 148, or 162;
SEQ ID NO: 100 and SEQ ID NO:162;
SEQ ID NOs: 124, 126, or 128 and SEQ ID NOs: 146, 148, 162, or 214; and
SEQ ID NO: 136 and SEQ ID NOs: 146, 148 or 214.

12. The method of claim 1, wherein the combination of the nuclear receptor expressed by said cell and the helper protein expressed by said cell are selected from the group consisting of:
TR beta and DRIP 205 or ERK2;
RAR beta and SRC1, DRIP205 or ERK2;
PPAR gamma and SRC1 or ERK2;
FXR and SRC1, DRIP205 or ERK2;
LXR beta and SRC1 or ERK2;
VDR and SRC1;
PXR and SRC1;
RXR alpha and DRIP205 or ERK2;
ER beta and SRC1, DRIP205 or ERK2;
AR and DRIP205;
MR and SRC1 or DRIP205;
GR and SRC 1;
SHP and SRC1 or ERK2;
RevERb alpha and ERK2;
ROR gamma and DRIP205;
HNF4 alpha and SRC1, DRIP205 or ERK2;
TR2 alpha and SRC1;
TLX and ERK2;
COUP-TF beta and SRC1 or DRIP205;
EAR2 and SRC1, DRIP205 or ERK2;
ERR gamma and ERK2;
NOR-1 and SRC1, DRIP205 or ERK2; and
GCNF and SRC1 or ERK2.

13. The method of claim 1, wherein said determining step comprises determining whether said compound influences the activity of said one or more nuclear receptors by evaluating a cellular parameter selected from the group consisting of morphology, phosphorylation, differentiation, apoptosis, process formation, motility, gene expression, expression of a cellular receptor, and a phenotypic change

14. The method of claim 1, further comprising introducing a nucleic acid comprising a promoter from which the level of transcription is responsive to activation of said nuclear receptor into said cell, said promoter being operably linked to a nucleic acid encoding a detectable product and determining whether said candidate compound influences the activity of said nuclear receptor by measuring the amount of said detectable product.

15. A method of identifying interaction between a nuclear receptor and one or more helper proteins, said method comprising:
co-transfecting a first cell culture with DNA encoding a nuclear receptor and DNA encoding a marker of cell amplification, along with DNA encoding one or more helper proteins;
incubating the cell culture with varying concentrations of a ligand which is an agonist or antagonist for said nuclear receptor for a period of time sufficient to permit cell amplification of said transfected cells in said first cell culture;
co-transfecting a second cell culture with DNA encoding a nuclear receptor and DNA encoding a marker of cell amplification;
incubating the cell culture with varying concentrations of a ligand which is an agonist or antagonist for said nuclear receptor for a period of time sufficient to permit cell amplification of said transfected cells in said second cell culture;
determining whether said one or more helper proteins interact with said nuclear receptor by comparing the level of amplification of transfected cells expressing said nuclear receptor and said one or more helper proteins to the level of amplification of cells which were transfected with DNA encoding said nuclear receptor but which were not transfected with DNA encoding said one or more helper proteins.

16. A method according to claim 15, wherein said one or more helper proteins is a coactivator.

17. A method according to claim 15, wherein said one or more helper proteins is a corepressor.

18. A method according to claim 15, wherein said one or more helper proteins is a kinase.

19. A method according to claim 15, wherein said one or more helper proteins is a signaling molecule.

20. A method according to claim 15, wherein said one or more helper proteins comprises at least two helper proteins selected from the group consisting of corepressors, and kinases, signaling molecules.

21. The method of claim 15, wherein said DNA encoding said nuclear receptor comprises a sequence selected from the group consisting of SEQ ID NOs. 1, 3, 5, 7, 9, 11, 13, 15, 17, 19, 21, 23, 25, 27, 29, 31, 33, 35, 37, 39, 41, 43, 45, 47, 49, 51, 53, 55, 57, 59, 61, 63, 65, 67, 69, 71, 73, 75, 77, 79, 81, 83, 85, 87, 89, 91, 93, 95, 97, 99, 101, 103, 105, 107, 109, 111, 113, 115, 117, 119, 121, 123, 125, 127, 129, 131, 133, 135, 137, 139, 141, and 143.

22. The method of claim 15, wherein said DNA encoding said nuclear receptor encodes a polypeptide comprising a sequence selected from the group consisting of SEQ ID NOs.: 2, 4, 6, 8, 10, 12, 14, 16, 18, 20, 22, 24, 26, 28, 30, 32, 34, 36, 38, 40, 42, 44, 46, 48, 50, 52, 54, 56, 58, 60, 62, 64, 66, 68, 70, 72, 74, 76, 78, 80, 82, 84, 86, 88, 90, 92, 94, 96, 98, 100, 102, 104, 106, 108, 110, 112, 114, 116, 118, 120, 122, 124, 126, 128, 130, 132, 134, 136, 138, 140, 142, and 144.

23. The method of claim 15, wherein said DNA encoding said one or more helper proteins comprises a sequence selected from the group consisting of SEQ ID NOs.: 145, 147, 149, 151, 153, 155, 157, 159, 161, 163, 165, 167, 169, 171, 173, 175, 177, 179, 181, 183, 185, 187, 189, 191, 193, 195, 197, 199, 201, 203, 205, 207, 209, 211, 213, 215, 217, 219, 221, 223, 225, 227, 229, 231, 233, 235, 237, 239, and 241.

24. The method of claim 15, wherein said DNA encoding said one or more helper proteins encodes a polypeptide comprising a sequence selected from the group consisting of SEQ ID NOs.: 146, 148, 150, 152, 154, 156, 158, 160, 162, 164, 166, 168, 170, 172, 174, 176, 178, 180, 182, 184, 186, 188, 190, 192, 194, 196, 198, 200, 202, 204, 206, 208, 210, 212, 214, 216, 218, 220, 222, 224, 226, 228, 230, 232, 234, 236, 238, 240, and 242.

25. The method of claim 15, wherein said DNA encoding said nuclear receptor and said DNA encoding said marker of cell amplification are on the same vector.

26. The method of claim 15, wherein said DNA encoding said nuclear receptor and said DNA encoding said marker of cell amplification are on separate vectors.

27. A method of identifying a substance which is a ligand of a nuclear receptor, said method comprising:
incubating a cell culture which comprises a mixture of cells transfected with DNA encoding a nuclear receptor, DNA encoding a marker of cell amplification and DNA encoding one or more helper proteins and untransfected cells, with a test substance which is a potential agonist or antagonist for said nuclear receptor for a period of time sufficient to permit cell amplification of said transfected cells; and
determining any increase or decrease in cell amplification by measuring the level of the marker in said transfected cells.

28. A method of identifying a substance which is a selective modulator of a particular combination of a nuclear receptor and one or more helper proteins, said method comprising:
co-transfecting a first cell culture comprising cells of a first cell type with DNA encoding a nuclear receptor and DNA encoding a marker of cell amplification, along with DNA encoding said one or more helper proteins;
incubating the first cell culture with a test substance;
determining whether said test substance increases or decreases amplification of said transfected cells of said first cell type relative to untransfected cells of said first cell type;
co-transfecting a second cell culture comprising cells of a second cell type with DNA encoding said nuclear receptor and DNA encoding said marker of cell amplification, along with DNA encoding said one or more helper proteins;
incubating the second cell culture with said test substance;
determining whether said test substance increases or decreases amplification of said transfected cells of said second cell type relative to untransfected cells of said second cell type;
wherein said test substance is a selective modulator of said nuclear receptor if the effects of said test substance on said first cell type are opposite to the effects of said test substance on said second cell type.

29. A method of identifying a substance which is a selective modulator of a particular combination of a nuclear receptor and one or more helper proteins, said method comprising:
co-transfecting a first cell culture with DNA encoding a nuclear receptor and DNA encoding a marker of cell amplification, along with DNA encoding one or more first helper proteins;
incubating the first cell culture with a test substance;
determining whether said test substance increases or decreases amplification of said transfected cells in said first cell culture relative to untransfected cells;
co-transfecting a second cell culture with DNA encoding said nuclear receptor and DNA encoding a marker of cell amplification, along with DNA encoding a second one or more helper proteins, wherein said second one or more helper proteins are distinct from said first one or more helper proteins;
incubating the second cell culture with said test substance;
determining whether said test substance increases or decreases amplification of said transfected cells in said second cell culture relative to untransfected cells;
wherein said test substance is a selective modulator of said nuclear receptor if the effects of said test substance on said first cell culture are opposite to the effects of said test substance on said second cell culture.

30. A method of identifying a substance which is a selective modulator of a nuclear receptor comprising:
co-transfecting a first cell culture comprising cells of a first cell type with DNA encoding a nuclear receptor and DNA encoding a marker of cell amplification;
incubating the first cell culture with a test substance;
determining whether said test substance increases or decreases amplification of said transfected cells of said first cell type relative to untransfected cells of said first cell type;
co-transfecting a second cell culture comprising cells of a second cell type with DNA encoding said nuclear receptor and DNA encoding said marker of cell amplification;
incubating the second cell culture with said test substance;
determining whether said test substance increases or decreases amplification of said transfected cells of said second cell type relative to untransfected cells of said second cell type;
wherein said test substance is a selective modulator of said nuclear receptor if the effects of said test substance on said first cell type are opposite to the effects of said test substance on said second cell type.

31. A method of detecting a substance which is a ligand of two nuclear receptors comprising:
incubating a cell culture which comprises a mixture of cells transfected with DNA encoding a first nuclear receptor, DNA encoding a second nuclear receptor, and DNA encoding a marker of cell amplification with a test substance which is a potential agonist or antagonist for said nuclear receptor for a period of time sufficient to permit cell amplification of said transfected cells; and
determining any increase or decrease in cell amplification by measuring the level of the marker of cell amplification in said transfected cells.

32. A method of detecting a substance which is a selective modulator of a particular combination of two nuclear receptors and one or more helper proteins comprising:
co-transfecting a first cell culture comprising cells of a first cell type with DNA encoding a first nuclear receptor, DNA encoding a second nuclear receptor, DNA encoding one or more helper proteins, and DNA encoding a marker of cell amplification;
incubating the first cell culture with a test substance;
determining whether said test substance increases or decreases amplification of said transfected cells in said first cell culture relative to untransfected cells in said first cell culture;
co-transfecting a second cell culture comprising cells of a second cell type with DNA encoding said first nuclear receptor, DNA encoding said second nuclear receptor and DNA encoding a marker of cell amplification;
incubating the second cell culture with said test substance; and
determining whether said test substance increases or decreases amplification of said transfected cells of said second cell type relative to untransfected cells of said second cell type;
wherein said test substance is a selective modulator of said nuclear receptor if the effects of said test substance on said first cell type are opposite to the effects of said test substance on said second cell type.

33. A method of identifying a substance which is a selective modulator of a particular combination of two nuclear receptors and one or more helper proteins comprising:
co-transfecting a first cell culture with DNA encoding a first nuclear receptor, DNA encoding a second nuclear receptor and DNA encoding a marker of cell amplification, along with DNA encoding one or more first helper proteins;
incubating the first cell culture with a test substance;
determining whether said test substance increases or decreases amplification of said transfected cells in said first cell culture relative to untransfected cells;
co-transfecting a second cell culture with DNA encoding said first nuclear receptor, DNA encoding said second nuclear receptor and DNA encoding a marker of cell amplification, along with DNA encoding a second one or more helper proteins, wherein said second one or more helper proteins are distinct from said first one or more helper proteins;
incubating the second cell culture with said test substance;
determining whether said test substance increases or decreases amplification of said transfected cells in said second cell culture relative to untransfected cells;
wherein said test substance is a selective modulator of said nuclear receptor if the effects of said test substance on said first cell culture are opposite to the effects of said test substance on said second cell culture.
